(19) United States
(12) Patent Application Publication
(10) Pub. No.: US 2006/0024696 A1
(43) Pub. Date: Feb. 2, 2006

(54) Nucleic acid and polypeptide sequences from Lawsonia intracellularis and methods of using

(76) Inventors: Vivek Kapur, Shoreview, MN (US); Connie J. Gebhart, Maple Grove, MN (US)

Correspondence Address: FISH & RICHARDSON P.C., PO BOX 1022, MINNEAPOLIS, MN, 55440-1022, US

(21) Appl. No.: 11/098,686

(22) Filed: Apr. 4, 2005

Related U.S. Application Data
(63) Continuation of application No. PCT/US03/31318, filed on Oct. 1, 2003.
(60) Provisional application No. 60/416,395, filed on Oct. 4, 2002.

(51) Int. Cl. C12Q 1/68; C07H 21/04; C12P 21/06; C07K 14/195; C12N 15/74

(52) U.S. Cl. 435/6; 435/69.1; 435/252.3; 435/320.1; 530/350; 536/23.7

(57) ABSTRACT

The present invention provides nucleic acid molecules unique to L. intracellularis. The invention also provides the polypeptides encoded by the L. intracellularis-specific nucleic acid molecules of the invention, and antibodies having specific binding affinity for the polypeptides encoded by the L. intracellularis-specific nucleic acid molecules. The invention further provides for methods of detecting L. intracellularis in a sample using nucleic acid molecules, polypeptides, and antibodies of the invention. The invention additionally provides methods of preventing a L. intracellularis infection in an animal.

### CROSS REFERENCE TO RELATED APPLICATIONS

[0001] This application is a continuation and claims benefit of priority to International Application No. PCT/US03/31318, having an International Filing Date of Oct. 1, 2003, which claims benefit under 35 U.S.C. § 119(e) of U.S. Application No. 60/416,395, filed Oct. 4, 2002.

### FEDERALLY SPONSORED RESEARCH OR DEVELOPMENT

[0002] The U.S. Government may have certain rights in this invention pursuant to Grant No. 00-52100-9687 from the USDA-CREES-IFAFS research initiative.

### INCORPORATION-BY-REFERENCE & TEXT

[0003] The material on the accompanying compact disc is hereby incorporated by reference into this application. The accompanying compact disc contains twenty files; Table 2.txt, Table 3.txt, Table 4.txt, Table 5.txt, Table 10.txt, Table 11.txt, Table 12.txt, Table 13.txt, Table 14.txt, Table 15.txt, Table 16.txt, Table 17.txt, Table 18.txt, Table 19.txt, Table 20.txt, Table 21.txt, Table 22.txt, Table 23.txt, Table 24.txt, and Table 25.txt, which were created on Apr. 4, 2005. The file named Table 2.txt is 58 KB, Table 3.txt is 76 KB, Table 4.txt is 294 KB, Table 5.txt is 2,386 KB, Table 10.txt is 27 KB, Table 11.txt is 39 KB, Table 12.txt is 191 KB, Table 13.txt is 1,424 KB, Table 14.txt is 11 KB, Table 15.txt is 8 KB, Table 16.txt is 33 KB, Table 17.txt is 466 KB, Table 18.txt is 24 KB, Table 19.txt is 29 KB, Table 20.txt is 161 KB, Table 21.txt is 1,284 KB, Table 22.txt is 9 KB, Table 23.txt is 11 KB, Table 24.txt is 57 KB, and Table 25.txt is 459 KB. The files can be accessed using Microsoft Word on a computer that uses Windows OS.

### TECHNICAL FIELD

[0004] This invention relates to bacterial nucleic acid and polypeptide sequences, and more particularly to nucleic acid and polypeptide sequences from Lawsonia intracellularis.

### BACKGROUND

[0005] Proliferative enteropathy (PE) is an economically important disease of pigs and other animals and has been reported in swine production facilities from throughout the world. In intensively reared pigs, PE can cause major problems due to a failure to gain weight and thrive, but PE also is a cause of sudden death of infected animals. The disease is characterized by the proliferation of intestinal enterocytes, especially in the ileum, that ultimately manifests itself as a gross thickening of the intestinal wall as seen at necropsy.

[0006] Reports of proliferative conditions of the intestines of pigs first appeared in 1931. However, it took more than 40 years before the presence of bacteria was described in the proliferative lesions. The identity of these intracellular organisms, however, remained elusive until the development of specific antisera and DNA probes against this agent strongly supported the hypothesis that this organism represented a novel bacterial species. Subsequently, analyses of 16S ribosomal DNA (rDNA) led to the recognition and naming of this intracellular bacterium as a novel organism, L. intracellularis, and classification in the delta subdivision of the Proteobacteria group. Lawsonia shares 91% 16S rDNA sequence homology with Desulfovibrio desulfuricans, a strictly anaerobic sulfate-reducer, and 92% homology with Bilophila wadsworthia. Further insight into the classification of L. intracellularis was provided by the cloning and sequencing of its groE operon. Phylogenetic analysis using the predicted amino acid sequence of the groEL homologs from databases showed that L. intracellularis is taxonomically isolated from other bacteria whose sequences are known. Using these methods, it's nearest relative was shown to be Helicobacter pylori. However, since there were no groEL sequences from Desulfovibrio species present in the databases at that time, a direct comparison between Desulfovibrio species and L. intracellularis could not be made.

[0007] L. intracellularis is a unique obligate intracellular bacterium that is cultivable in vitro only in cell culture and requires a specific microaerophilic environment. It is a Gram-negative organism with a single polar flagellum. The morphology of Lawsonia is a typical vibroid-shaped rod 0.3 to 0.4 by 1.5 by 2.0 um. The life cycle of Lawsonia species within infected cells closely resembles that of another obligately intracellular bacterium, Rickettsia tsutsugamushi. Lawsonia species have only been observed to grow and multiply within the cytosol, often in close proximity to cell mitochondria.

[0008] In animals, L. intracellularis causes proliferation of intestinal cells, resulting in enteric disease or even death. The disease is responsible for serious economic loss to swine production worldwide. Proliferative intestinal lesions, caused by this organism, have also been described in numerous other species, including hamsters, foals, dogs, deer, fox, rabbits, rats, emus, ostriches and non-human primates. The wide host range of L. intracellularis and the fact that it has been described in primates suggests that it may also be a human pathogen under certain conditions.

[0009] Despite the great morbidity, mortality, and economic impact that results from disease due to L. intracellularis, very little is known about the genetic basis for the virulence of this organism. Further, the molecular mechanisms for infection and virulence and the epidemiology of this organism in pigs and other species remain undetermined. Additionally, little is known about the natural physiology of this organism including factors that enable it to colonize the host. Furthermore, accurate and sensitive methods for the routine detection of infected animals are also lacking. For these reasons, it is important to identify L. intracellularis-specific nucleic acids and/or polypeptides.

### SUMMARY

[0010] The present invention provides nucleic acid molecules unique to L. intracellularis. The invention also provides polypeptides encoded by the L. intracellularis-specific nucleic acid molecules of the invention, and antibodies having specific binding affinity for the polypeptides encoded by the L. intracellularis-specific nucleic acid molecules. The invention further provides methods of detecting L. intracellularis in a sample using nucleic acid molecules, polypeptides, or antibodies of the invention. The invention additionally provides methods of preventing a L. intracellularis infection in an animal.

[0011] In one aspect, the invention provides an isolated nucleic acid, wherein the nucleic acid comprises a nucleic acid molecule of at least 10 nucleotides in length, the molecule having at least 75% sequence identity to SEQ ID NO:8741, or the complement of the molecule, wherein any the molecule that is 10 to 29 nucleotides in length, in combination with an appropriate second nucleic acid molecule, under standard amplification conditions, generates an amplification product from L. intracellularis nucleic acid but does not generate an amplification product from nucleic acid of any of the organisms selected from the group consisting of Homo sapiens, Pseudomonas aeruginosa, Streptomyces viridochromogenes, Mus musculus, Felis catus, and Xanthomonas campestris. The invention provides for an article of manufacture containing such a nucleic acid of the invention.

[0012] A nucleic acid of the invention can have at least 75%, at least 80%, at least 85%, at least 90%, at least 95%, or at least 99% sequence identity to any of SEQ ID NO:1-62, 131-8727, 8736-8739, 8741, or 8743.

[0013] In another aspect of the invention, there is provided an isolated nucleic acid, wherein the nucleic acid comprises a nucleic acid molecule of at least 10 nucleotides in length, the molecule having at least 75% sequence identity to any of SEQ ID NOs:1-62, 131-8727, 8736-8739, 8741, or 8743, or the complement of any such molecule, wherein any the molecule that is 10 to N nucleotides in length, in combination with an appropriate second nucleic acid molecule, under standard amplification conditions, generates an amplification product from L. intracellularis nucleic acid but does not generate an amplification product from nucleic acid of any of the organisms shown in Tables 2, 3, 4, and 5 for each respective SEQ ID NO. The value of N for each SEQ ID NO can also be determined from Tables 2, 3, 4, and 5.

[0014] In another aspect, the invention provides for vectors comprising a nucleic acid of the invention. Host cells comprising such a vector are further provided by the invention.

[0015] In yet another aspect, the invention provides for isolated polypeptides encoded by the nucleic acids of the invention. For example, the nucleic acid molecules having the sequence of SEQ ID NOs:1-62 can encode a polypeptide having an amino acid sequence of SEQ ID NOs:63-124, respectively, or a nucleic acid molecule having the sequence of SEQ ID NO:8741 can encode a polypeptide having an amino acid sequence of SEQ ID NO:8740. The nucleic acid sequence and the encoded amino acid sequence for predicted open reading frames are shown in Tables 18-21 and 22-25, respectively.

[0016] In another aspect, the invention provides articles of manufacture that include one or more polypeptides of the invention. In still another aspect of the invention, there are provided antibodies that have specific binding affinity for a polypeptide of the invention.

[0017] In another aspect, the invention provides for methods for detecting the presence or absence of L. intracellularis in a biological sample. Such methods include contacting the biological sample with one or more of the nucleic acids of the invention (e.g., SEQ ID NOs:1-62 and 131-8727) under standard amplification conditions, wherein an amplification product is produced if L. intracellularis nucleic acid is present in the biological sample; and detecting the presence or absence of the amplification product. Generally, the presence of the amplification product indicates the presence of L. intracellularis in the biological sample, and the absence of the amplification product indicates the absence of L. intracellularis in the biological sample. Representative animals from which the biological sample can be derived include pigs, hamsters, foals, dogs, deer, fox, rabbits, rats, emus, ostriches, non-human primates, and humans. Representative biological samples include a fecal sample and a blood sample. Further, representative nucleic acids that can be used in the above-described methods include those having the sequence of SEQ ID NO:8728-8735.

[0018] In another aspect, the invention provides methods for detecting the presence or absence of L. intracellularis in a biological sample. Such methods include contacting the biological sample with one or more of the nucleic acids of the invention (e.g., SEQ ID NOs:1-62 and 131-8727) under hybridization conditions, wherein a hybridization complex is produced if L. intracellularis nucleic acid molecules are present in the biological sample; and detecting the presence or absence of the hybridization complex. Generally, the presence of the hybridization complex indicates the presence of L. intracellularis in the biological sample, and the absence of the hybridization complex indicates the absence of L. intracellularis in the biological sample. Typically, nucleic acids present in the biological sample are electrophoretically separated. Such electrophoretically separated nucleic acids can be attached to a solid support. Representative solid supports include nylon membranes and nitrocellulose membranes. Further, one or more nucleic acids can be labeled. Representative biological samples include a fecal sample and a blood sample.

[0019] In another aspect, the invention provides methods for detecting the presence or absence of L. intracellularis in a biological sample. Such methods include contacting the biological sample with a polypeptide of the invention (e.g., SEQ ID NOs:63-124 and those shown in Tables 22-25), wherein a polypeptide-antibody complex is produced if an antibody having specific binding affinity for the polypeptide is present in the sample; and detecting the presence or absence of the polypeptide-antibody complex. Typically, the presence of the polypeptide-antibody complex indicates the presence of L. intracellularis in the biological sample, and the absence of the polypeptide-antibody complex indicates the absence of L. intracellularis in the biological sample. Polypeptides used in the above-described method can be attached to a solid support. Further, representative biological samples include a blood sample and a milk sample.

[0020] In yet another aspect, the invention provides for methods for detecting the presence or absence of L. intracellularis in a biological sample. Such methods include contacting the biological sample with an antibody of the invention (e.g., an antibody having specific binding affinity for a polypeptide having an amino acid sequence of SEQ ID NOs:63-124 and those shown in Tables 22-25), wherein an antibody-polypeptide complex is produced if a polypeptide is present in the biological sample for which the antibody has specific binding affinity, and detecting the presence or absence of the antibody-polypeptide complex. Generally, the presence of the antibody-polypeptide complex indicates the presence of L. intracellularis in the biological sample, and the absence of the antibody-polypeptide complex indicates the absence of L. intracellularis in the biological sample. Antibodies used in the above-described methods can be bound to a solid support. Representative biological samples that can be used in the above-described methods include a blood sample and a fecal sample.

[0021] In still another aspect of the invention, there are provided methods of preventing infection by L. intracellularis in an animal. Such methods include administering a compound to the animal, wherein the compound comprises a polypeptide of the invention (e.g., SEQ ID NOs:63-124 and those shown in Tables 22-25). Alternatively, such methods include administering a compound to the animal, wherein the compound comprises a nucleic acid of the invention (e.g., a nucleic acid comprising a nucleic acid molecule having at least 75% sequence identity to SEQ ID NOs:1-62 and 131-8727). Typically, the compound immunizes the animal against L. intracellularis.

[0022] In another aspect, the invention provides a composition comprising a first oligonucleotide primer and a second oligonucleotide primer, wherein the first oligonucleotide primer and the second oligonucleotide primer are each 10 to 50 nucleotides in length, and wherein the first and second oligonucleotide primers, in the presence of L. intracellularis nucleic acid, generate an amplification product under standard amplification conditions, but do not generate an amplification product in the presence of nucleic acid from an organism other than L. intracellularis. The invention provides articles of manufacture containing such a composition.

[0023] In yet another aspect of the invention, there is provided an isolated nucleic acid that comprises a nucleic acid molecule greater than 10 nucleotides in length having at least 75% sequence identity to SEQ ID NO:8741 or to the complement of SEQ ID NO:8741, wherein said molecule hybridizes under stringent conditions with L. intracellularis nucleic acid but does not hybridize with nucleic acid from an organism other than L. intracellularis under the same hybridization conditions.

[0024] Unless otherwise defined, all technical and scientific terms used herein have the same meaning as commonly understood by one of ordinary skill in the art to which this invention belongs. Although methods and materials similar or equivalent to those described herein can be used in the practice or testing of the present invention, suitable methods and materials are described below. In addition, the materials, methods, and examples are illustrative only and not intended to be limiting. All publications, patent applications, patents, and other references mentioned herein are incorporated by reference in their entirety. In case of conflict, the present specification, including definitions, will control.

[0025] The details of one or more embodiments of the invention are set forth in the accompanying drawings and the description below. Other features, objects, and advantages of the invention will be apparent from the drawings and detailed description, and from the claims.

### DESCRIPTION OF DRAWINGS

[0026] FIG. 1 shows the sequences of L. intracellularis-specific nucleic acid molecules (SEQ ID NOs:1-62).

[0027] FIG. 2 shows the polypeptide sequences (SEQ ID NOs:63-124) encoded by L. intracellularis-specific nucleic acids. An * indicates a stop codon.

[0028] FIG. 3 shows representative nucleic acid molecules having 75%, 80%, 85%, 90%, 95%, and 99% sequence identity to SEQ ID NO:2 (SEQ ID NOs:125-130, respectively).

### DETAILED DESCRIPTION

[0029] Lawsonia intracellularis, the agent of proliferative enteropathy, is an obligate intracellular pathogen. Very little is known about the genetic basis for the virulence, pathogenesis, or physiology of this bacterium. The present invention provides nucleic acid molecules that are unique to L. intracellularis and therefore, can be used for diagnosis and immunoprophylaxis. The invention also provides the L. intracellularis-specific polypeptides encoded by the nucleic acid molecules of the invention, and antibodies having specific binding affinity for the L. intracellularis-specific polypeptides. The nucleic acid molecules, polypeptides, and antibodies of the invention can be used in methods of the invention to detect L. intracellularis in a sample. The invention additionally provides methods of preventing a L. intracellularis infection in an animal.

Isolated L. intracellularis-Specific Nucleic Acid Molecules

[0030] The present invention is based, in part, on the identification of nucleic acid molecules that are unique to L. intracellularis. These nucleic acid molecules are herein referred to as “L. intracellularis-specific” nucleic acid molecules. Particular nucleic acid molecules of the invention include the sequences shown in SEQ ID NOs:1-62 and 131-8727. As used herein, the term “nucleic acid molecule” can include DNA molecules and RNA molecules and analogs of the DNA or RNA molecule generated using nucleotide analogs. A nucleic acid molecule of the invention can be single-stranded or double-stranded, and the strandedness will depend upon its intended use.

[0031] The invention further encompasses nucleic acid molecules that differ from the nucleotide sequence of SEQ ID NOs:1-62 and 131-8727. Nucleic acid molecules of the invention include molecules that are at least 10 nucleotides in length and that have at least 75% sequence identity (e.g., at least 80%, 85%, 90%, 95%, or 99% sequence identity) to any of SEQ ID NOs:1-62 and 131-8727. Nucleic acid molecules that differ in sequence from the nucleic acid sequences shown in SEQ ID NOs:1-62 and 131-8727 can be generated by standard techniques, such as site-directed mutagenesis or PCR-mediated mutagenesis. In addition, nucleotide changes can be introduced randomly along all or part of the L. intracellularis-specific nucleic acid molecule, such as by saturation mutagenesis. Alternatively, nucleotide changes can be introduced into a sequence by chemically synthesizing a nucleic acid molecule having such changes.

[0032] In calculating percent sequence identity, two sequences are aligned and the number of identical matches of nucleotides or amino acid residues between the two sequences is determined. The number of identical matches is divided by the length of the aligned region (i.e., the number of aligned nucleotides or amino acid residues) and multiplied by 100 to arrive at a percent sequence identity value. It will be appreciated that the length of the aligned region can be a portion of one or both sequences up to the full-length size of the shortest sequence. It also will be appreciated that a single sequence can align with more than one other sequence and hence, can have different percent sequence identity values over each aligned region. It is noted that the percent identity value is usually rounded to the nearest integer. For example, 78.1%, 78.2%, 78.3%, and 78.4% are rounded down to 78%, while 78.5%, 78.6%, 78.7%, 78.8%, and 78.9% are rounded up to 79%. It is also noted that the length of the aligned region is always an integer.

[0033] The alignment of two or more sequences to determine percent sequence identity is performed using the algorithm described by Altschul et al. (1997, Nucleic Acids Res., 25:3389-3402) as incorporated into BLAST (basic local alignment search tool) programs, available at http://www.ncbi.nlm.nih.gov. BLAST searches can be performed to determine percent sequence identity between a L. intracellularis-specific nucleic acid molecule of the invention and any other sequence or portion thereof aligned using the Altschul et al. algorithm. BLASTN is the program used to align and compare the identity between nucleic acid sequences, while BLASTP is the program used to align and compare the identity between amino acid sequences. When utilizing BLAST programs to calculate the percent identity between a sequence of the invention and another sequence, the default parameters of the respective programs are used. Sequence analysis of the L. intracellularis-specific nucleic acid sequences as performed herein used BLAST version 2.2.3 (updated on Apr. 24, 2002) and 2.2.6 (updated on Apr. 9, 2003).

[0034] The sequences of representative nucleic acids of the invention having 75%, 80%, 85%, 90%, 95%, and 99% sequence identity to SEQ ID NO:2 are shown in FIG. 3 (SEQ ID NOs:125-130, respectively). Such sequences can be generated using a computer or by hand. The nucleic acid sequences shown in SEQ ID NOs:125-130 were generated by hand by randomly changing 25 nucleotides out of every 100 nucleotides of SEQ ID NO:2, 2 out of every 10, 15 out of every 100, 1 out of every 10, 5 out of every 100, or 1 nucleotide out of every 100 nucleotides of SEQ ID NO:2, respectively. By “changing,” it is meant that the nucleotide at a particular position is replaced randomly with one of the other three nucleotides. It is apparent to those of ordinary skill in the art that any nucleic acid molecule within the scope of the invention can be generated using the same method described herein (i.e., by similarly changing nucleotides within the sequence of SEQ ID NOs:1-62 or 131-8727).

[0035] The full-length sizes of representative novel L. intracellularis-specific nucleic acid molecules having the sequences shown in SEQ ID NOs:1-62 are indicated in Table 1.

TABLE 1
Sizes of L. intracellularis-specific
nucleic acids and polypeptides

| GenBank | SEQ ID | Nucleic Acid | | Polypeptide |
|---|---|---|---|---|
| Accession No. | NO: | (bp) | SEQ ID NO: | (amino acids) |
| BH795457 | 1 | 740 | 63 | 192 |
| BH795458 | 2 | 729 | 64 | 78 |
| BH795459 | 3 | 778 | 65 | 200 |
| BH795460 | 4 | 787 | 66 | 169 |
| BH795461 | 5 | 734 | 67 | 118 |
| BH795462 | 6 | 748 | 68 | 141 |
| BH795463 | 7 | 767 | 69 | 115 |
| BH795464 | 8 | 799 | 70 | 125 |
| BH795465 | 9 | 852 | 71 | 136 |
| BH795466 | 10 | 847 | 72 | 121 |
| BH795467 | 11 | 754 | 73 | 154 |
| BH795468 | 12 | 752 | 74 | 165 |
| BH795469 | 13 | 794 | 75 | 142 |
| BH795470 | 14 | 762 | 76 | 144 |
| BH795471 | 15 | 881 | 77 | 131 |
| BH795472 | 16 | 809 | 78 | 98 |
| BH795473 | 17 | 844 | 79 | 141 |
| BH795474 | 18 | 776 | 80 | 131 |
| BH795475 | 19 | 860 | 81 | 126 |
| BH795476 | 20 | 797 | 82 | 163 |
| BH795477 | 21 | 772 | 83 | 189 |
| BH795478 | 22 | 753 | 84 | 72 |
| BH795479 | 23 | 762 | 85 | 103 |
| BH795480 | 24 | 727 | 86 | 207 |
| BH795481 | 25 | 752 | 87 | 157 |
| BH795482 | 26 | 711 | 88 | 83 |
| BH795483 | 27 | 872 | 89 | 88 |
| BH795484 | 28 | 742 | 90 | 181 |
| BH795485 | 29 | 780 | 91 | 60 |
| BH795486 | 30 | 789 | 92 | 176 |
| BH795487 | 31 | 795 | 93 | 169 |
| BH795488 | 32 | 754 | 94 | 178 |
| BH795489 | 33 | 737 | 95 | 136 |
| BH795490 | 34 | 745 | 96 | 161 |
| BH795491 | 35 | 741 | 97 | 163 |
| BH795492 | 36 | 773 | 98 | 129 |
| BH795493 | 37 | 803 | 99 | 187 |
| BH795494 | 38 | 811 | 100 | 152 |
| BH795495 | 39 | 716 | 101 | 148 |
| BH795496 | 40 | 785 | 102 | 175 |
| BH795497 | 41 | 805 | 103 | 103 |
| BH795498 | 42 | 794 | 104 | 91 |
| BH795499 | 43 | 741 | 105 | 108 |
| BG795500 | 44 | 788 | 106 | 103 |
| BH795501 | 45 | 789 | 107 | 131 |
| BH795502 | 46 | 772 | 108 | 66 |
| BH795503 | 47 | 735 | 109 | 163 |
| BH795504 | 48 | 791 | 110 | 208 |
| BH795505 | 49 | 713 | 111 | 172 |
| BH795506 | 50 | 765 | 112 | 101 |
| BH795507 | 51 | 791 | 113 | 196 |
| BH795508 | 52 | 756 | 114 | 154 |
| BH795509 | 53 | 799 | 115 | 117 |
| BH795510 | 54 | 726 | 116 | 164 |
| BH795511 | 55 | 766 | 117 | 163 |
| BH795512 | 56 | 796 | 118 | 187 |
| BH795513 | 57 | 776 | 119 | 138 |
| BH795514 | 58 | 776 | 120 | 179 |
| BH795515 | 59 | 771 | 121 | 92 |
| BH795516 | 60 | 711 | 122 | 141 |
| BH795517 | 61 | 777 | 123 | 154 |
| BH795518 | 62 | 746 | 124 | 164 |

[0036] Tables 2, 3, 4, and 5 (contained on the appended compact disc, which has been incorporated by reference herein) represent sequences from L. intracellularis' four genetic elements (plasmids 1, 2, and 3, and the chromosome, respectively), with each consecutive SEQ ID NO corresponding to consecutive 200 bp fragments from the respective genetic element. For example, SEQ ID NO:131 corresponds to nucleotide positions 1 to 200 of plasmid 1 (SEQ ID NO:8736), SEQ ID NO:132 corresponds to nucleotide positions 201 to 400 of plasmid 1 (SEQ ID NO:8736), and so forth. It would be apparent to one of skill in the art that any number of contiguous or non-contiguous fragments from any of the genetic elements of L. intracellularis can be joined together to generate a longer L. intracellularis-specific nucleic acid. Similarly, any number of fragments can be generated, using standard recombinant or synthetic nucleic acid procedures, that span one or more of the fragment junctions represented in Tables 2, 3, 4, and 5.

[0037] Using Tables 2, 3, 4, and 5 as references, any nucleic acid molecule of the invention that is between 10 and N nucleotides in length will, under standard amplification conditions, generate an amplification product in the presence of L. intracellularis nucleic acid using an appropriate second nucleic acid molecule (e.g., an oligonucleotide primer) but will not generate an amplification product from nucleic acid of any of the organisms shown in Tables 2, 3, 4, or 5 corresponding to the respective SEQ ID NO, using an appropriate third nucleic acid molecule (e.g., an oligonucleotide primer that specifically anneals to nucleic acid from the other organism). For example, for SEQ ID NO:132 (fragment 2 of plasmid 1), any such molecule that is 10 to 21 nucleotides in length, under standard amplification conditions, generates an amplification product from L. intracellularis nucleic acid using an appropriate second nucleic acid molecule, but does not generate an amplification product from nucleic acid of Homo sapiens or Danio rerio using an appropriate third nucleic acid molecule.

[0038] With respect to the organisms identified in Tables 2, 3, 4, and 5, some of them represent multiple species, subspecies, or strains. To test whether or not particular reagents distinguish between L. intracellularis and such species, subspecies, or strains, it may be desirable to test a representative number of species, subspecies, or strains, respectively. In cases where the genetic variation is minimal within the species, subspecies, or strains, it may not be necessary to test more than one or two species, subspecies, or strains, respectively. In other cases, multiple species, subspecies, or strains may need to be tested, although initial testing can focus on the most genetically distant species, subspecies, or strains, respectively.

[0039] As used herein, “standard amplification conditions” refer to the basic components of an amplification reaction mix, and cycling conditions that include multiple cycles of denaturing the template nucleic acid, annealing the oligonucleotide primers to the template nucleic acid, and extension of the primers by the polymerase to produce an amplification product (see, for example, U.S. Pat. Nos. 4,683,195; 4,683,202; 4,800,159; and 4,965,188). The basic components of an amplification reaction mix generally include, for example, about 10-25 nmole of each of the four deoxynucleoside triphosphates, (e.g., dATP, dCTP, dTTP, and dGTP, or analogs thereof), 10-100 pmol of primers, template nucleic acid, and a polymerase enzyme. The reaction components are generally suspended in a buffered aqueous solution having a pH of between about 7 and about 9. The aqueous buffer can further include one or more co-factors (e.g., Mg²⁺, K⁺) required by the polymerase. Additional components such as DMSO are optional. Template nucleic acid is typically denatured at a temperature of at least about 90° C., and extension from primers is typically performed at a temperature of at least about 72° C.

[0040] The annealing temperature can be used to control the specificity of amplification. The temperature at which primers anneal to template nucleic acid must be below the Tm of each of the primers, but high enough to avoid non-specific annealing of primers to the template nucleic acid. The Tm is the temperature at which half of the DNA duplexes have separated into single strands, and can be predicted for an oligonucleotide primer using the formula provided in section 11.46 of Sambrook et al. (1989, Molecular Cloning: A Laboratory Manual, 2nd Ed., Cold Spring Harbor Laboratory Press, Cold Spring Harbor, N.Y.). Non-specific amplification products are detected as bands on a gel that are not the size expected for the correct amplification product. The annealing temperature used in amplification reactions to demonstrate that the claimed nucleic acid molecules are L. intracellularis-specific can be 57° C. It can be appreciated by those of skill in the art that appropriate positive and negative controls should be performed with every set of amplification reactions to avoid uncertainties related to contamination and/or non-specific annealing of oligonucleotide primers and extension therefrom.

[0041] An appropriate second nucleic acid molecule is generally an oligonucleotide primer that specifically anneals to L. intracellularis nucleic acid and that can act in combination with a nucleic acid molecule of the invention, specifically, for example, a 10 to 30-, or 40-, or 50-nucleotide-long nucleic acid molecule of the invention, under appropriate amplification conditions to generate an amplification product in the presence of L. intracellularis nucleic acid. In order for a second nucleic acid molecule to act in combination with a nucleic acid molecule of the invention to generate an amplification product, the two molecules must anneal to opposite strands of the template nucleic acid, and should be an appropriate distance from one another such that the polymerase can effectively polymerize across the region and such that the amplification product can be readily detected using, for example, electrophoresis. Oligonucleotide primers can be designed using, for example, a computer program such as OLIGO (Molecular Biology Insights Inc., Cascade, Colo.) to assist in designing primers that have similar melting temperatures. Typically, oligonucleotide primers can be 10 to 50 nucleotides in length (e.g., 12, 14, 16, 18, 20, 22, 24, 26, 28, 30, 32, 34, 36, 38, 40, 42, 44, 46, 48, or 50 nucleotides in length).

[0042] Representative pairs of oligonucleotide primers that were used to amplify each of the L. intracellularis-specific nucleic acid molecules of the invention are shown in Table 8 (SEQ ID NOs:8728-8735). Alternatively, the nucleic acid molecules having the sequences shown in SEQ ID NOs:1-62 and 131-8727 can be used to design a pair of oligonucleotide primers. Oligonucleotides of the invention can be obtained by restriction enzyme digestion of L. intracellularis-specific nucleic acid molecules or can be prepared by standard chemical synthesis and other known techniques.

[0043] As used herein, an organism other than L. intracellularis refers to any organism that is not L. intracellularis. Generally, only relevant organisms are used in amplification reactions to examine the specificity of a 10 or more nucleotide-long nucleic acid molecule of the invention. Particularly relevant organisms include, without limitation, Brachyspira hyodysenteria, Brachyspira pylosicoli, E. coli, Salmonella typhimurium, Salmonella choleraesuis, Bilophila wadsworthiae, and Clostridium difficile.

[0044] As used herein, an “isolated” nucleic acid molecule is a nucleic acid molecule that is separated from other nucleic acid molecules that are usually associated with the isolated nucleic acid molecule. Thus, an “isolated” nucleic acid molecule includes, without limitation, a nucleic acid molecule that is free of sequences that naturally flank one or both ends of the nucleic acid in the genome of the organism from which the isolated nucleic acid is derived (e.g., a cDNA or genomic DNA fragment produced by PCR or restriction endonuclease digestion). Such an isolated nucleic acid molecule is generally introduced into a vector (e.g., a cloning vector, or an expression vector) for convenience of manipulation or to generate a fusion nucleic acid molecule. In addition, an isolated nucleic acid molecule can include an engineered nucleic acid molecule such as a recombinant or a synthetic nucleic acid molecule. A nucleic acid molecule existing among hundreds to millions of other nucleic acid molecules within, for example, a nucleic acid library (e.g., a cDNA, or genomic library) or a portion of a gel (e.g., agarose, or polyacrylamine) containing restriction-digested genomic DNA is not to be considered an isolated nucleic acid.

[0045] Isolated nucleic acid molecules of the invention can be obtained using techniques routine in the art. For example, isolated nucleic acids within the scope of the invention can be obtained using any method including, without limitation, recombinant nucleic acid technology, and/or the polymerase chain reaction (PCR). General PCR techniques are described, for example in PCR Primer: A Laboratory Manual, Dieffenbach & Dveksler, Eds., Cold Spring Harbor Laboratory Press, 1995. Recombinant nucleic acid techniques include, for example, restriction enzyme digestion and ligation, which can be used to isolate a nucleic acid molecule of the invention. Isolated nucleic acids of the invention also can be chemically synthesized, either as a single nucleic acid molecule or as a series of oligonucleotides. In addition, isolated nucleic acid molecules of the invention also can be obtained by mutagenesis. For example, an isolated nucleic acid that shares identity with an art known sequence can be mutated using common molecular cloning techniques (e.g., site-directed mutagenesis). Possible mutations include, without limitation, deletions, insertions, substitutions, and combinations thereof.

[0046] Vectors containing L. intracellularis-specific nucleic acid molecules also are provided by the invention. Vectors, including expression vectors, suitable for use in the present invention are commercially available and/or produced by recombinant DNA technology methods routine in the art. A vector containing a L. intracellularis-specific nucleic acid molecule can have elements necessary for expression operably linked to such a L. intracellularis-specific nucleic acid, and further can include sequences such as those encoding a selectable marker (e.g., an antibiotic resistance gene), and/or those that can be used in purification of a L. intracellularis-specific polypeptide (e.g., 6×His tag).

[0047] Elements necessary for expression include nucleic acid sequences that direct and regulate expression of nucleic acid coding sequences. One example of an element necessary for expression is a promoter sequence, for example, a L. intracellularis-specific promoter (e.g., from the same coding sequence being expressed or from a different coding sequence) or a non-L. intracellularis-specific promoter. Elements necessary for expression also can include introns, enhancer sequences, response elements, or inducible elements that modulate expression of a L. intracellularis-specific nucleic acid. Elements necessary for expression can be of bacterial, yeast, insect, mammalian, or viral origin and vectors can contain a combination of elements from different origins. Elements necessary for expression are described, for example, in Goeddel, 1990, Gene Expression Technology: Methods in Enzymology, 185, Academic Press, San Diego, Calif. As used herein, operably linked means that a promoter and/or other regulatory element(s) are positioned in a vector relative to a L. intracellularis-specific nucleic acid in such a way as to direct or regulate expression of the L. intracellularis-specific nucleic acid. Many methods for introducing nucleic acids into cells, both in vivo and in vitro, are well known to those skilled in the art and include, without limitation, calcium phosphate precipitation, electroporation, heat shock, lipofection, microinjection, and viral-mediated nucleic acid transfer.

[0048] Another aspect of the invention pertains to host cells into which a vector of the invention, e.g., an expression vector, or an isolated nucleic acid molecule of the invention has been introduced. The term “host cell” refers not only to the particular cell but also to the progeny or potential progeny of such a cell. A host cell can be any prokaryotic or eukaryotic cell. For example, L. intracellularis-specific nucleic acids can be expressed in bacterial cells such as E. coli, or in insect cells, yeast or mammalian cells (such as Chinese hamster ovary cells (CHO) or COS cells). Other suitable host cells are known to those skilled in the art.

[0049] Vectors containing nucleic acid molecules unique to L. intracellularis were deposited with the American Type Culture Collection (ATCC), 10801 University Boulevard Manassas, Va. 20110, on ______, and assigned Accession Numbers ______, ______, ______, and ______. Each deposit will be maintained under the terms of the Budapest Treaty on the International Recognition of the Deposit of Microorganisms for the Purposes of Patent Procedure. This deposit was made merely as a convenience for those of skill in the art and is not an admission that a deposit is required under 35 U.S.C. §112.

Purified L. intracellularis Polypeptides

[0050] One aspect of the invention pertains to purified L. intracellularis-specific polypeptides, as well as polypeptide fragments. A “L. intracellularis-specific polypeptide” refers to a polypeptide encoded by a nucleic acid molecule that is unique to L. intracellularis (e.g., L. intracellularis-specific nucleic acid molecules, for example, those having the sequences shown in SEQ ID NOs:1-62 and 131-8727). Predicted amino acid sequences encoded by L. intracellularis-specific nucleic acids of the invention are shown in SEQ ID NOs:63-124.

[0051] The term “purified” polypeptide as used herein refers to a polypeptide that has been separated or purified from cellular components that naturally accompany it. Typically, the polypeptide is considered “purified” when it is at least 70% (e.g., at least 75%, 80%, 85%, 90%, 95%, or 99%) by dry weight, free from the proteins and naturally occurring molecules with which it is naturally associated. Since a polypeptide that is chemically synthesized is, by nature, separated from the components that naturally accompany it, a synthetic polypeptide is “purified.”

[0052] L. intracellularis-specific polypeptides can be purified from natural sources (e.g., a biological sample) by known methods such as DEAE ion exchange, gel filtration, and hydroxyapatite chromatography. A purified L. intracellularis-specific polypeptide also can be obtained by expressing a L. intracellularis-specific nucleic acid in an expression vector, for example. In addition, a purified L. intracellularis-specific polypeptide can be obtained by chemical synthesis. The extent of purity of a L. intracellularis-specific polypeptide can be measured using any appropriate method, e.g., column chromatography, polyacrylamide gel electrophoresis, or HPLC analysis.

[0053] In addition to naturally-occurring L. intracellularis-specific polypeptides, the skilled artisan will further appreciate that changes can be introduced into a nucleic acid molecule (e.g., those having the sequence shown in SEQ ID NOs:1-62 and 131-8727) as discussed herein, thereby leading to changes in the amino acid sequence of the encoded polypeptide. For example, changes can be introduced into L. intracellularis-specific nucleic acid coding sequences leading to conservative and/or non-conservative amino acid substitutions at one or more amino acid residues. A “conservative amino acid substitution” is one in which one amino acid residue is replaced with a different amino acid residue having a similar side chain. Similarity between amino acid residues has been assessed in the art. For example, Dayhoff et al. (1978, in Atlas of Protein Sequence and Structure, Vol. 5, Suppl. 3, pp 345-352) provides frequency tables for amino acid substitutions that can be employed as a measure of amino acid similarity. A non-conservative substitution is one in which an amino acid residue is replaced with an amino acid residue that does not have a similar side chain.

[0054] The invention also provides for chimeric or fusion polypeptides. As used herein, a “chimeric” or “fusion” polypeptide includes a L. intracellularis-specific polypeptide operatively linked to a heterologous polypeptide. A heterologous polypeptide can be at either the N-terminus or C-terminus of the L. intracellularis-specific polypeptide. Within a chimeric or fusion polypeptide, the term “operatively linked” is intended to indicate that the two polypeptides are encoded in-frame relative to one another. In a fusion polypeptide, the heterologous polypeptide generally has a desired property such as the ability to purify the fusion polypeptide (e.g., by affinity purification). A chimeric or fusion polypeptide of the invention can be produced by standard recombinant DNA techniques, and can use commercially available vectors.

[0055] A polypeptide commonly used in a fusion polypeptide for purification is glutathione S-transferase (GST), although numerous other polypeptides are available and can be used. In addition, a proteolytic cleavage site can be introduced at the junction between a L. intracellularis-specific polypeptide and a non-L. intracellularis-specific polypeptide to enable separation of the two polypeptides subsequent to purification of the fusion polypeptide. Enzymes that cleave such proteolytic sites include Factor Xa, thrombin, or enterokinase. Representative expression vectors encoding a heterologous polypeptide that can be used in affinity purification of a L. intracellularis polypeptide include pGEX (Pharmacia Biotech Inc; Smith & Johnson, 1988, Gene, 67:31-40), pMAL (New England Biolabs, Beverly, Mass.) and pRIT5 (Pharmacia, Piscataway, N.J.).

Anti-L. intracellularis-Specific Antibodies

[0056] Another aspect of the invention relates to anti-L. intracellularis-specific antibodies. The term “anti-L. intracellularis-specific antibodies” as used herein refers to immunoglobulin molecules and immunologically active portions of immunoglobulin molecules that have specific binding affinity for a L. intracellularis-specific polypeptide. The invention provides polyclonal and monoclonal antibodies that have specific binding affinity for L. intracellularis-specific polypeptides. The sequences of numerous L. intracellularis-specific polypeptides that can be used to generate anti-L. intracellularis-specific antibodies are disclosed herein (e.g., SEQ ID NOs:63-124). Examples of immunologically active portions of immunoglobulin molecules include F(ab) and F(ab′)₂ fragments, which can be generated by treating an immunoglobulin molecule with an enzyme such as pepsin. As used herein, an antibody that has “specific binding affinity” for a L. intracellularis-specific polypeptide is an antibody that binds a L. intracellularis-specific polypeptide but does not bind a non-L. intracellularis-specific polypeptides. A non-L. intracellularis-specific polypeptide as used herein refers to a polypeptide that may or may not be found in L. intracellularis, but is found in at least one other organism besides L. intracellularis.

[0057] A purified L. intracellularis-specific polypeptide or a fragment thereof can be used as an immunogen to generate polyclonal or monoclonal antibodies that have specific binding affinity for L. intracellularis-specific polypeptides. Such antibodies can be generated using standard techniques as described herein. Full-length L. intracellularis-specific polypeptides (see Table 1) or, alternatively, antigenic fragments of L. intracellularis-specific polypeptides can be used as immunogens. An antigenic fragment of a L. intracellularis-specific polypeptide usually includes at least 8 (e.g., 10, 15, 20, or 30) amino acid residues of a L. intracellularis-specific polypeptide (e.g., having the sequence shown in SEQ ID NOs:63-124), and encompasses an epitope of a L. intracellularis-specific polypeptide such that an antibody (e.g., polyclonal or monoclonal) raised against the antigenic fragment has specific binding affinity for a L. intracellularis-specific polypeptide.

[0058] Antibodies are typically prepared by first immunizing a suitable animal (e.g., a rabbit, a goat, a mouse or another mammal) with an immunogenic preparation. An appropriate immunogenic preparation can contain, for example, a recombinantly expressed or chemically synthesized L. intracellularis-specific polypeptide, of a fragment thereof. The preparation can further include an adjuvant, such as Freund's complete or incomplete adjuvant, or similar immunostimulatory agent. Immunization of a suitable animal with an immunogenic L. intracellularis-specific polypeptide preparation induces a polyclonal anti-L. intracellularis-specific antibody response.

[0059] The titer of the anti-L. intracellularis-specific antibody in the immunized animal can be monitored over time by standard techniques, such as with an enzyme-linked immunosorbent assay (ELISA) using immobilized L. intracellularis-specific polypeptides. If desired, the antibody molecules directed against L. intracellularis-specific polypeptides can be isolated from the animal (e.g., from the blood) and further purified by well-known techniques such as protein A chromatography to obtain the IgG fraction.

[0060] At an appropriate time after immunization, e.g., when the anti-L. intracellularis-specific antibody titers are highest, antibody-producing cells can be obtained from the animal and used to prepare monoclonal antibodies by standard techniques, such as the hybridoma technique originally described by Kohler & Milstein (1975, Nature, 256:495-497), the human B cell hybridoma technique (Kozbor et al., 1983, Immunol. Today, 4:72), or the EBV-hybridoma technique (Cole et al., 1985, Monoclonal Antibodies and Cancer Therapy, Alan R. Liss, Inc., pp. 77-96). The technology for producing various monoclonal antibody hybridomas is well known (see, generally, Current Protocols in Immunology, 1994, Coligan et al. (Eds.), John Wiley & Sons, Inc., New York, N.Y.). Briefly, an immortal cell line (e.g., a myeloma cell line) is fused to lymphocytes (e.g., splenocytes) from an animal immunized with an immunogenic L. intracellularis-specific polypeptide as described above, and the culture supernatants of the resulting hybridoma cells are screened to identify a hybridoma producing a monoclonal antibody that has specific binding affinity for the L. intracellularis-specific polypeptide.

[0061] Any of the well-known protocols used for fusing lymphocytes and immortalized cell lines can be applied for the purpose of generating an anti-L. intracellularis-specific monoclonal antibody (see, e.g., Current Protocols in Immunology, supra; Galfre et al., 1977, Nature, 266:55052; R. H. Kenneth, in Monoclonal Antibodies: A New Dimension In Biological Analyses, Plenum Publishing Corp., New York, N.Y., 1980; and Lerner, 1981, Yale J. Biol. Med., 54:387-402). Moreover, the ordinary skilled worker will appreciate that there are many variations of such methods that also would be useful. Typically, the immortal cell line is derived from the same species as the lymphocytes. For example, murine hybridomas can be made by fusing lymphocytes from a mouse immunized with an immunogenic preparation with an immortalized mouse cell line, e.g., a myeloma cell line that is sensitive to culture medium containing hypoxanthine, aminopterin and thymidine (“HAT medium”). Any of a number of ATCC-available myeloma cell lines can be used as a fusion partner according to standard techniques, e.g., the P3-NS1/1-Ag4-1, P3-x63-Ag8.653 or Sp2/O—Ag14 myeloma lines. Typically, HAT-sensitive mouse myeloma cells are fused to mouse splenocytes using polyethylene glycol (PEG). Hybridoma cells resulting from the fusion are then selected using HAT medium. Hybridoma cells producing a monoclonal antibody are detected by screening the hybridoma culture supernatants for antibodies that bind L. intracellularis-specific polypeptides, e.g., using a standard ELISA assay.

[0062] As an alternative to preparing monoclonal antibody-secreting hybridomas, an anti-L. intracellularis-specific monoclonal antibody can be identified and isolated by screening a recombinant combinatorial immunoglobulin library (e.g., an antibody phage display library) with L. intracellularis-specific polypeptides. Immunoglobulin library members that have specific binding affinity for L. intracellularis-specific polypeptides can be isolated from such libraries. Kits for generating and screening phage display libraries are commercially available (e.g., the Pharmacia Recombinant Phage Antibody System, Catalog No. 27-9400-01; and the Stratagene SurfZAP Phage Display Kit, Catalog No. 240612). Additionally, examples of methods and reagents particularly amenable for use in generating and screening antibody display libraries can be found in, for example, U.S. Pat. No. 5,223,409; PCT Publication No. WO 92/20791; PCT Publication No. WO 93/01288; Hay et al., 1992, Hum. Antibod. Hybridomas, 3:81-85; Griffiths et al., 1993, EMBO J, 12:725-734; and references therein.

[0063] Additionally, recombinant anti-L. intracellularis-specific antibodies, such as chimeric and humanized monoclonal antibodies, comprising both human and non-human portions, are within the scope of the invention. Such chimeric and humanized monoclonal antibodies can be produced by recombinant DNA techniques known in the art, for example using methods described in PCT Publication No. WO 87/02671; European Patent (EP) Application 184,187; U.S. Pat. No. 4,816,567; Better et al., 1988, Science, 240:1041-1043; Shaw et al., 1988, J. Natl. Cancer Inst., 80:1553-1559); U.S. Pat. No. 5,225,539; Verhoeyan et al., 1988, Science, 239:1534; Beidler et al., 1988, J. Immunol., 141:4053-4060; and references therein.

[0064] An anti-L. intracellularis-specific antibody (e.g., a monoclonal antibody) can be used to isolate L. intracellularis-specific polypeptides by standard techniques, such as affinity chromatography or immunoprecipitation. An anti-L. intracellularis-specific antibody can facilitate the purification of natural L. intracellularis-specific polypeptides from cells and of recombinantly-produced L. intracellularis-specific polypeptides expressed in host cells. Moreover, an anti-L. intracellularis-specific antibody can be used to detect L. intracellularis-specific polypeptides (e.g., in a cellular lysate or cell supernatant) in order to evaluate the presence or absence of the L. intracellularis-specific polypeptides. Anti-L. intracellularis-specific antibodies can be used diagnostically to detect L. intracellularis-specific polypeptides, and hence, L. intracellularis, in a biological sample, e.g., to determine the infection status of an animal, or to determine the efficacy of a given treatment regimen.

Methods of Detecting L. intracellularis

[0065] The L. intracellularis-specific nucleic acid molecules and polypeptides, and the anti-L. intracellularis-specific antibodies described herein can be used in diagnostic assays for the detection of L. intracellularis. Diagnostic assays for determining the presence or absence of L. intracellularis are performed using a biological sample (e.g., a fecal sample) to determine whether an animal has been exposed to or is infected with L. intracellularis. An exemplary method for detecting the presence or absence of L. intracellularis in a biological sample involves obtaining a biological sample from an animal and contacting the biological sample with an appropriate agent capable of detecting L. intracellularis-specific nucleic acids or polypeptides, or anti-L. intracellularis-specific antibodies.

[0066] The term “biological sample” is intended to include cells and biological fluids obtained from an animal. In one embodiment, a biological sample contains polypeptides from the animal. Alternatively, the biological sample can contain nucleic acid molecules from the animal, or the biological sample can contain antibodies from the animal. It should be understood that any biological sample in which L. intracellularis-specific nucleic acids or polypeptides, or anti-L. intracellularis-specific antibodies may be present can be utilized in the methods described herein.

[0067] In one embodiment, an agent for detecting the presence or absence of L. intracellularis in a biological sample is an isolated L. intracellularis-specific nucleic acid molecule of the invention. The presence of L. intracellularis-specific nucleic acids in a sample indicates the presence of L. intracellularis in the sample. Methods for detecting nucleic acids include, for example, PCR and nucleic acid hybridizations (e.g., Southern blot, Northern blot, or in situ hybridizations). Specifically, an agent can be one or more oligonucleotides (e.g., oligonucleotide primers) capable of amplifying L. intracellularis-specific nucleic acids using PCR. PCR methods generally include the steps of collecting a biological sample from an animal, isolating nucleic acid (e.g., DNA, RNA, or both) from the sample, and contacting the nucleic acid with one or more oligonucleotide primers that hybridize(s) with specificity to L. intracellularis-specific nucleic acid under conditions such that amplification of the L. intracellularis-specific nucleic acid occurs if L. intracellularis is present. In the presence of L. intracellularis, an amplification product corresponding to the L. intracellularis-specific nucleic acid is produced. Conditions for amplification of a nucleic acid and detection of an amplification product are known to those of skill in the art (see, e.g., PCR Primer: A Laboratory Manual, 1995, Dieffenbach & Dveksler, Eds., Cold Spring Harbor Laboratory Press, Cold Spring Harbor, N.Y.; and U.S. Pat. Nos. 4,683,195; 4,683,202; 4,800,159; and 4,965,188). Modifications to the original PCR also have been developed. For example, anchor PCR, RACE PCR, or ligation chain reaction (LCR) are additional PCR methods known in the art (see, e.g., Landegran et al., 1988, Science, 241:1077-1080; and Nakazawa et al., 1994, Proc. Natl. Acad. Sci. USA, 91:360-364).

[0068] Alternatively, an agent for detecting L. intracellularis-specific nucleic acids can be a labeled oligonucleotide probe capable of hybridizing to L. intracellularis-specific nucleic acids on a Southern blot. An oligonucleotide probe can be, for example, a L. intracellularis-specific nucleic acid molecule such as a nucleic acid molecule having the sequence shown in SEQ ID NO:1-62 or 131-8727, or a fragment thereof. In the presence of L. intracellularis, a hybridization complex is produced between L. intracellularis nucleic acid and the oligonucleotide probe. Hybridization between nucleic acid molecules is discussed in detail in Sambrook et al. (1989, Molecular Cloning: A Laboratory Manual, 2^{nd} Ed., Cold Spring Harbor Laboratory Press, Cold Spring Harbor, N.Y.; Sections 7.37-7.57, 9.47-9.57, 11.7-11.8, and 11.45-11.57).

[0069] For oligonucleotide probes less than about 100 nucleotides, Sambrook et al. discloses suitable Southern blot conditions in Sections 11.45-11.46. The Tm between a sequence that is less than 100 nucleotides in length and a second sequence can be calculated using the formula provided in Section 11.46. Sambrook et al. additionally discloses prehybridization and hybridization conditions for a Southern blot that uses oligonucleotide probes greater than about 100 nucleotides (see Sections 9.47-9.52). Hybridizations with an oligonucleotide greater than 100 nucleotides generally are performed 15-25° C. below the Tm. The Tm between a sequence greater than 100 nucleotides in length and a second sequence can be calculated using the formula provided in Sections 9.50-9.51 of Sambrook et al. Additionally, Sambrook et al. recommends the conditions indicated in Section 9.54 for washing a Southern blot that has been probed with an oligonucleotide greater than about 100 nucleotides.

[0070] The conditions under which membranes containing nucleic acids are prehybridized and hybridized, as well as the conditions under which membranes containing nucleic acids are washed to remove excess and non-specifically bound probe can play a significant role in the stringency of the hybridization. Such hybridizations and washes can be performed, where appropriate, under moderate or high stringency conditions. Such conditions are described, for example, in Sambrook et al. section 11.45-11.46. For example, washing conditions can be made more stringent by decreasing the salt concentration in the wash solutions and/or by increasing the temperature at which the washes are performed. In addition, interpreting the amount of hybridization can be affected, for example, by the specific activity of the labeled oligonucleotide probe, by the number of probe-binding sites on the template nucleic acid to which the probe has hybridized, and by the amount of exposure of an autoradiograph or other detection medium.

[0071] It will be readily appreciated by those of ordinary skill in the art that although any number of hybridization and washing conditions can be used to examine hybridization of a probe nucleic acid molecule to immobilized target nucleic acids, it is more important to examine hybridization of a probe to target nucleic acids, for example, from L. intracellularis and at least one organism other than L. intracellularis, under identical hybridization, washing, and exposure conditions. Preferably, the target nucleic acids (e.g., nucleic acids from L. intracellularis and at least one organism other than L. intracellularis) are on the same membrane. Representative Southern blot conditions are described in Example 9.

[0072] A nucleic acid molecule is deemed to hybridize to L. intracellularis nucleic acids but not to nucleic acids from an organism other than L. intracellularis if hybridization to nucleic acid from L. intracellularis is at least 5-fold (e.g., at least 6-fold, 7-fold, 8-fold, 9-fold, 10-fold, 20-fold, 50-fold, or 100-fold) greater than hybridization to nucleic acid from an organism other than L. intracellularis. The amount of hybridization can be quantitated directly on a membrane or from an autoradiograph using, for example, a Phosphorimager or a Densitometer (Molecular Dynamics, Sunnyvale, Calif.). It can be appreciated that useful primers and probes of the invention include primers and probes that anneal and hybridize, respectively, to nucleic acids of organisms other than L. intracellularis provided that such nucleic acids are not typically present in the relevant test animals. For example, the fact that a particular primer or probe anneals or hybridizes, respectively, to human nucleic acid does not diminish the value of that primer or probe for detecting the presence or absence of M. paratuberculosis in ruminants, since ruminants typically are not contaminated with human nucleic acid.

[0073] In addition, anti-L. intracellularis-specific antibodies provided by the invention can be used as agents to detect the presence or absence of L. intracellularis-specific polypeptides in a biological sample. The presence of L. intracellularis-specific polypeptides is an indication of the presence of L. intracellularis in the sample. Techniques for detecting L. intracellularis-specific polypeptides include enzyme linked immunosorbent assays (ELISAs), Western blots, immunoprecipitations and immunofluorescence. An antibody of the invention can be polyclonal or monoclonal, and usually is detectably labeled. An antibody having specific binding affinity for a L. intracellularis-specific polypeptide can be generated using methods described herein. The antibody can be attached to a solid support such as a microtiter plate using methods known in the art (see, for example, Leahy et al., 1992, BioTechniques, 13:738-743). In the presence of L. intracellularis, an antibody-polypeptide complex is formed.

[0074] In addition, L. intracellularis-specific polypeptides of the invention can be used as an agent to detect the presence or absence of anti-L. intracellularis-specific antibodies in a biological sample. The presence of anti-L. intracellularis-specific antibodies in a sample indicates that the animal from which the sample was obtained mounted an immune response toward L. intracellularis. Given the etiology of L. intracellularis in its host animals, an animal that has detectable levels of anti-L. intracellularis-specific antibodies is likely infected with L. intracellularis. Alternatively, an animal that is positive for anti-L. intracellularis-specific antibodies may have resisted infection following a previous exposure to L. intracellularis, or may possess maternally transmitted anti-L. intracellularis-specific antibodies. Techniques for detecting anti-L. intracellularis-specific antibodies in a biological sample include ELISAs, Western blots, immunoprecipitations, and immunofluorescence. A L. intracellularis-specific polypeptide can be attached to a solid support such as a microtiter plate by known methods (Leahy et al., supra). In the presence of L. intracellularis, a polypeptide-antibody complex is formed.

[0075] Detection of an amplification product, a hybridization complex, an antibody-polypeptide complex, or a polypeptide-antibody complex is usually accomplished by detectably labeling the respective agent. The term “labeled” with regard to an agent (e.g., an oligonucleotide, a polypeptide, or an antibody) is intended to encompass direct labeling of the agent by coupling (i.e., physically linking) a detectable substance to the agent, as well as indirect labeling of the agent by reactivity with another reagent that is directly labeled with a detectable substance. Detectable substances include various enzymes, prosthetic groups, fluorescent materials, luminescent materials, bioluminescent materials, and radioactive materials. Examples of suitable enzymes include horseradish peroxidase, alkaline phosphatase, β-galactosidase, or acetylcholinesterase; examples of suitable prosthetic group complexes include streptavidin/biotin and avidin/biotin; examples of suitable fluorescent materials include umbelliferone, fluorescein, fluorescein isothiocyanate, rhodamine, dichlorotriazinylamine fluorescein, dansyl chloride or phycoerythrin; an example of a luminescent material includes luminol; examples of bioluminescent materials include luciferase, luciferin, and aequorin, and examples of suitable radioactive material include ¹²⁵I, ¹³¹I, ³⁵S or ³H. Examples of indirect labeling include using a fluorescently labeled secondary antibody to detect an appropriate agent (e.g., a primary antibody), or end-labeling an agent with biotin such that it can be detected with fluorescently labeled streptavidin.

[0076] In another embodiment, the methods further involve obtaining a biological sample from an animal known to be infected with L. intracellularis (positive control) and a non-infected (negative control) animal, contacting the control samples with an agent capable of detecting L. intracellularis-specific nucleic acids or polypeptides, or anti-L. intracellularis-specific antibodies, such that the presence or absence of L. intracellularis-specific nucleic acids or polypeptides, or anti-L. intracellularis-specific antibodies in the samples is determined. The presence or absence of L. intracellularis-specific nucleic acids or polypeptides, or anti-L. intracellularis-specific antibodies in the control samples should correlate with the presence and absence of L. intracellularis in the positive and negative control samples, respectively.

Methods of Preventing a L. intracellularis Infection

[0077] In one aspect, the invention provides methods for preventing a disease or condition associated with infection by L. intracellularis (e.g., proliferative enteropathy) in an animal by administering a compound to the animal that immunizes the animal against L. intracellularis infection. Animals at risk for L. intracellularis infection can be administered the compound prior to the manifestation of symptoms that are characteristic of a L. intracellularis infection, such that a L. intracellularis infection is prevented or delayed in its progression.

[0078] In one embodiment, a compound that immunizes an animal can be a L. intracellularis-specific polypeptide. The sequences of representative L. intracellularis-specific polypeptides are disclosed herein (e.g., SEQ ID NOs:63-124) and can be produced using methods described herein. An L. intracellularis-specific polypeptide can be a fusion polypeptide, for example a L. intracellularis-specific polypeptide-immunoglobulin fusion polypeptide in which all or part of a L. intracellularis-specific polypeptide is fused to sequences derived from a member of the immunoglobulin family. An L. intracellularis-specific polypeptide or fusion polypeptide of the invention can be used as an immunogen to elicit anti-L. intracellularis-specific antibodies in an animal, thereby immunizing the animal.

[0079] In another embodiment, a compound that immunizes an animal can be a L. intracellularis-specific nucleic acid molecule. A L. intracellularis-specific nucleic acid molecule used to immunize an animal can include one of the L. intracellularis-specific nucleic acid molecules having the sequence shown in SEQ ID NOs:1-62 or 131-8727. L. intracellularis-specific nucleic acid coding sequences (e.g., full-length or otherwise) can be introduced into an appropriate expression vector such that a L. intracellularis-specific polypeptide or fusion polypeptide is produced in the animal upon appropriate expression of the expression vector. Expression of the L. intracellularis-specific nucleic acid molecule and production of a L. intracellularis-specific polypeptide in an animal thereby elicits an immune response in the animal and thereby immunizes the animal.

[0080] Compounds that can be used in immunogenic compositions of the invention (e.g., L. intracellularis-specific nucleic acid molecules or L. intracellularis-specific polypeptides) can be incorporated into pharmaceutical compositions suitable for administration. Such compositions typically comprise the nucleic acid molecule or polypeptide, and a pharmaceutically acceptable carrier. As used herein, “pharmaceutically acceptable carrier” is intended to include any and all solvents, dispersion media, coatings, antibacterial and anti-fungal agents, isotonic and absorption delaying agents, and the like, compatible with pharmaceutical administration. The use of such media and agents for pharmaceutically active substances is well known in the art. Except insofar as any conventional media or agent is incompatible with the active compound, use thereof in the compositions is contemplated. Supplementary active compounds can also be incorporated into the compositions.

[0081] A pharmaceutical composition of the invention is formulated to be compatible with its intended route of administration. Examples of routes of administration include parenteral, e.g., intravenous, intradermal, subcutaneous, oral (e.g., ingestion or inhalation), transdermal (topical), transmucosal, and rectal administration. Solutions or suspensions used for parenteral, intradermal, or subcutaneous application can include the following components: a sterile diluent such as water for injection, saline solution (e.g., phosphate buffered saline (PBS)), fixed oils, a polyol (for example, glycerol, propylene glycol, and liquid polyetheylene glycol, and the like), glycerine, or other synthetic solvents; antibacterial and antifungal agents such as parabens, chlorobutanol, phenol, ascorbic acid, thimerosal, and the like; antioxidants such as ascorbic acid or sodium bisulfite; chelating agents such as ethylenediaminetetraacetic acid; buffers such as acetates, citrates or phosphates and agents for the adjustment of tonicity such as sodium chloride or dextrose. The proper fluidity can be maintained, for example, by the use of a coating such as lecithin, by the maintenance of the required particle size in the case of dispersion and by the use of surfactants. In many cases, it will be preferable to include isotonic agents, for example, sugars, polyalcohols such as mannitol or sorbitol, and sodium chloride in the composition. Prolonged administration of the injectable compositions can be brought about by including an agent that delays absorption. Such agents include, for example, aluminum monostearate and gelatin. The parenteral preparation can be enclosed in ampoules, disposable syringes or multiple dose vials made of glass or plastic.

[0082] Oral compositions generally include an inert diluent or an edible carrier. Oral compositions can be liquid, or can be enclosed in gelatin capsules or compressed into tablets. Pharmaceutically compatible binding agents, and/or adjuvant materials can be included as part of an oral composition. Tablets, pills, capsules, troches and the like can contain any of the following ingredients, or compounds of a similar nature: a binder such as microcrystalline cellulose, gum tragacanth or gelatin; an excipient such as starch or lactose; a disintegrating agent such as alginic acid, Primogel, or corn starch; a lubricant such as magnesium stearate or Sterotes; a glidant such as colloidal silicon dioxide; a sweetening agent such as sucrose or saccharin; or a flavoring agent such as peppermint, methyl salicylate, or orange flavoring. Transmucosal administration can be accomplished through the use of nasal sprays or suppositories. For transdermal administration, the active compounds are formulated into ointments, salves, gels, or creams as generally known in the art.

[0083] It is especially advantageous to formulate oral or parenteral compositions in dosage unit form for ease of administration and uniformity of dosage. Dosage unit form as used herein refers to physically discrete units suited as unitary dosages for an animal to be treated; each unit containing a predetermined quantity of active compound calculated to produce the desired therapeutic effect in association with the required pharmaceutical carrier. The dosage unit forms of the invention are dependent upon the amount of a compound necessary to immunize the animal. The amount of a compound necessary to immunize an animal can be formulated in a single dose, or can be formulated in multiple dosage units. Immunization of an animal may require a one-time dose, or may require repeated doses.

[0084] For polypeptide vaccines, the dose typically is from about 0.1 mg/kg to about 100 mg/kg of body weight (generally, about 0.5 mg/kg to about 5 mg/kg). Modifications such as lipidation (Cruikshank et al., 1997, J. Acquired Immune Deficiency Syndromes and Human Retrovirology, 14:193) can be used to stabilize polypeptides and to enhance uptake and tissue penetration. For nucleic acid vaccines, the dose administered will depend on the level of expression of the expression vector. Preferably, the amount of vector that produces an amount of a L. intracellularis-specific polypeptide from about 0.1 mg/kg to about 100 mg/kg of body weight is administered to an animal.

Articles of Manufacture of the Invention

[0085] The invention encompasses articles of manufacture (e.g., kits) for detecting the presence of L. intracellularis-specific nucleic acids or polypeptides, or anti-L. intracellularis-specific antibodies in a biological sample (a test sample). Such kits can be used to determine if an animal has been exposed to, or is infected with, L. intracellularis. For example, a kit of the invention can include an agent capable of detecting L. intracellularis-specific nucleic acids or polypeptides, or anti-L. intracellularis-specific antibodies in a biological sample (e.g., a L. intracellularis-specific oligonucleotide, an anti-L. intracellularis-specific antibody, or a L. intracellularis-specific polypeptide, respectively).

[0086] For antibody-based kits to detect L. intracellularis-specific polypeptides, the kit can include, for example, a first antibody (e.g., attached to a solid support) that has specific binding affinity for a L. intracellularis-specific polypeptide and, optionally, a second antibody which binds to L. intracellularis-specific polypeptides or to the first antibody and is detectably labeled. For oligonucleotide-based kits to detect L. intracellularis-specific nucleic acids, the kit may comprise, for example, one or more oligonucleotides. For example, a kit of the invention can include a detectably labeled oligonucleotide probe that hybridizes to a L. intracellularis-specific nucleic acid molecule or a pair of oligonucleotide primers for amplifying a L. intracellularis-specific nucleic acid molecule. Such oligonucleotides provided in a kit of the invention can be detectably labeled or, alternatively, the components necessary for detectably labeling an oligonucleotide can be provided in the kit. Polypeptide-based kits for detecting anti-L. intracellularis-specific antibodies in a biological sample can contain a L. intracellularis-specific polypeptide as disclosed herein (e.g., attached to a solid support) and, optionally, an antibody that binds to L. intracellularis-specific polypeptides or to an anti-L. intracellularis-specific antibody and is detectably labeled.

[0087] Kits can include additional reagents (e.g., buffers, co-factors, or enzymes) as well as reagents for detecting the agent (e.g., labels or other detection molecules), as well as instructions for using such agents and reagents to detect the presence or absence of L. intracellularis-specific nucleic acids or polypeptides, or anti-L. intracellularis-specific antibodies. The kit can also contain a control sample or a series of control samples that can be assayed and compared to the biological sample. Each component of the kit is usually enclosed within an individual container and all of the various containers are within a single package.

[0088] The invention also encompasses articles of manufacture (e.g., vaccines) for preventing L. intracellularis infection in an animal. Articles of manufacture of the invention can include pharmaceutical compositions containing either a L. intracellularis-specific nucleic acid molecule or a L. intracellularis-specific polypeptide. Such nucleic acid molecules or polypeptides are formulated for administration as described herein, and are packaged appropriately for the intended route of administration. Pharmaceutical compositions of the invention further can include instructions for administration.

[0089] The invention will be further described in the following examples, which do not limit the scope of the invention described in the claims.

### EXAMPLES

### Example 1

### L. intracellularis Isolate

[0090] L. intracellularis VPB4 represents an isolate of the bacterium recovered from a pig during an outbreak of proliferative hemorrhagic enteropathy (PE) in the United States. This isolate can grow well and to relatively high titers in cell cultures in the laboratory. Vials of L. intracellularis VPB4 were maintained in sucrose-potassium glutamate (SPG; pH 7.0) solution containing 0.218 M sucrose, 0.0038 M KH₂PO₄, 0.0072 M K₂HPO₄ and 0.0049 M potassium glutamate plus 10% fetal bovine serum (FBS; Sigma, St. Louis, Mo.) at −80° C.

### Example 2

### Cultivation of L. intracellularis

[0091] Murine fibroblast-like McCoy cells (ATCC CRL 1696) were grown in Dulbecco's Modified Eagles Media (DMEM; Gibco Invitrogen Corporation, Carlsbad, Calif.) with 1% L-glutamine (Gibco Invitrogen Corporation) and 5% FBS, without antibiotics, at 37° C. in 5% CO₂. Briefly, McCoy cells were trypsinised and 5×10⁴ cells were seeded into a 175 cm² flask and incubated overnight at 37° C. in 5% CO₂. After rapidly thawing at 37° C., about 10⁴ L. intracellularis VPB4 organisms were diluted in DMEM with 1% L-glutamine and 7% FBS before being added to this 175 cm² flask containing about 30% confluent monolayer of McCoy cells. The flask was then placed in a container which was evacuated to 500 mm Hg and refilled with medical grade hydrogen and then incubated in a microaerophilic atmosphere of 8% O₂, 8.8% CO₂ and 83.2% N₂ at 37° C. The medium was replaced again 2 and 4 days after infection and the infection was harvested 7 days post inoculation for passage. The level of infection was assessed before each passage by scraping a small area of the McCoy cell monolayer from the infected flask, transferring those cells to a clean glass slide, acetone fixing them and staining by indirect immunoperoxidase using a monoclonal antibody specific for L. intracellularis (McOrist et al., 1987, Vet. Rec., 121:421-422).

[0092] The passage of infected cells was performed by treatment with 0.1% potassium chloride followed by removal of the cells from the flask with a cell scraper. Scraped cells were ruptured by passage six times through a 20-gauge needle and used to infect fresh McCoy cells in 175 cm² flasks.

### Example 3

### Purification of L. intracellularis

[0093] The monolayer of McCoy cells highly infected with L. intracellularis was harvested and the infection was passed weekly into 175 cm² flasks, using the same technique described above. Once the monolayer was 100% infected, the number of flasks containing L. intracellularis infected McCoy monolayer was tripled weekly for three weeks when bacteria present in the supernatant were combined and centrifuged for 20 minutes at 150×g to pellet any McCoy cells present in the cell culture supernatant. The bacterial cells were then centrifuged for 30 minutes at 3,400×g and the resultant L. intracellularis pellet was washed three times with PBS and stored at 4° C.

### Example 4

### Construction of a Random Small Insert Library of L. intracellularis

[0094] L. intracellularis cells were resuspended with TES buffer (50 mM Tris, 250 mM EDTA, 200 mM NaCl, pH 7.6). The suspension was mixed with an equal volume of 1.3% low melt preparative grade agarose (Bio-Rad Laboratories, Richmond, Calif.) in TES buffer and aliquoted into plug molds. Subsequent treatments with lysozyme and proteinase K were performed as previously described (Maslow et al., 1993, Diagnostic Molecular Microbiology, American Society of Microbiology, 563-72) and DNA in agarose plugs was digested with Sau3A1 (New England Biolabs, Beverly, Mass.) and separated by gel electrophoresis. The resulting fragments in the range of 0.8-2.0 kb were gel-purified with QIAEX II gel extraction kit (Qiagen, Valencia, Calif.) and then cloned into a BamH1-restricted, calf Intestinal alkaline phosphatase-treated pUC18 vector (Pharmacia, Piscataway, resulting library was >90% recombinant and contained more than 50,000 independent recombinant clones.

### Example 5

### Sequencing of L. intracellularis

[0095] As a source of template for sequencing, the small insert total genomic library described above was used. Approximately 300 recombinant clones were sequenced using M13 reverse and forward primers and ABI model 377 automated DNA sequencers (Applied Biosystems, Foster City, Calif.) at the Advanced Genetic Analysis Center (AGAC) at the University of Minnesota. Sequence data analyzing and editing were performed with public-domain software (phred, phrap, and consed; http://www.genome.washington.edu/UVGC/protocols/). Similarity searches were performed with BLASTn and BLASTx analysis using a local peptides database, which included non-redundant GenBank, SwissProt, OWL, TrEMBL, PIR, and NRL databases. The aligned nucleotide sequences were visually inspected, and the genes were assigned with known or putative functions based on similarity searches.

### Example 6

### Electron Microscopy of L. intracellularis

[0096] For examination of L. intracellularis by transmission electron microscopy, bacteria from 7-day cell culture supernatants were pelleted by centrifugation for 30 min at 3400×g and washed once with PBS. Bacteria were adsorbed onto Formvar-coated copper grids (Electron Microscopy Sciences, Fort Wash., Pa.) for 5 min and fixed on a drop of 0.5% glutaraldehyde for 2 min. The grids were then washed 3 times with distilled water for 10 sec each wash, negatively stained with 3% phosphotungstic acid (pH 6.8), and examined with a transmission electron microscope (Jeol 1200EX, Jeol USA, Inc., Peabody, Mass.).

### Example 7

### Nucleotide Sequence Accession Numbers

[0097] The nucleotide sequences of numerous L. intracellularis genes described in this study were deposited in the GenBank/EMBL nucleotide sequence data library and assigned Accession Numbers BH795457 through BH795518.

### Example 8

### Representative Sequences Identified

[0098] A total of 498 sequencing reactions were completed initially, with an average number of 632 bases per sequence reaction. This resulted in the generation of over 386,616 bp of total sequence representing 282,699 bp of unique (non-overlapping) L. intracellularis genomic DNA sequence or nearly 15% of the entire genomic sequence of this pathogen (Table 6). Comparison of the 498 L. intracellularis sequences with sequences from SwissProt or other sequences deposited in GenBank's microbial database indicates that only a small minority of sequences (n=82; 17%) had orthologs in the public sequence databases. The orthologs were from genera such as included Aquiflex, Bacillus, Escherishcia, Hemophilus, Helicobacter, Mycobacterium, Pseudomonas, Snechncystis, Treponema, Desulfovibrio, and others. A complete listing of all of the orthologs in the databases along with predicted function, Accession Number, and the species from which the closest ortholog originates are presented in Table 7.

TABLE 6
Summary of random sequencing of the small-insert total
genomic L. intacellularis library

| | |
|---|---|
| Total sequencing reactions | 498 |
| Average number of bases/sequencing reaction | 632 |
| Total number of bases obtained | 386,616 |
| Total number of unique bases of DNA | 282,699 |
| Number of matches to known proteins^{a} | 82 (17%) |

^{a}Threshold for significant homology; smallest probability <1.0e−10 using BLASTX on non-redundant GenBank, SwissProt, OWL, TrEMBL, PIR and NRL.

[0099] TABLE 7
Sequence similarities between L. intracellularis sequences and
sequences in public databases.^{a}

| | | | | |
|---|---|---|---|---|
| Predicted function | Gene | Accession No. | Species | P(n) |

I Cell envelope and cellular processes
I. 1 Cell structure

| | | | | |
|---|---|---|---|---|
| Rod shape-determining protein | rodA | SWP O83514 | Treponema pallidum | 2.00E−23 |
| Penicillin-binding protein | pbpAl | PIR C71661 | Rickettsia prowazekii | 3.00E−18 |
| Penicillin-binding protein 3 | | PIR S54872 | Pseudomonas aeruginosa | 1.00E−14 |
| Penicillin-binding protein 1A | pbpA | SWP P02918 | Escherichia coli | 1.00E−20 |
| Protective surface antigen D15 | | EMB O25369 | Helicobacter pylori | 3.00E−14 |
| Membrane protein | | PIR H70597 | Mycobacterium tuberculosis | 4.00E−13 |

I. 2 Transport/binding proteins and lipoproteins

| | | | | |
|---|---|---|---|---|
| Membrane bound Yop protein | pcrD | PIR O30536 | Pseudomonas aeruginosa | 3.00E−33 |
| GTP binding protein | lepA | SWP P74751 | Synechocystis sp. | 4.00E−41 |
| Tellurite resistance protein | tehA | SWP P25396 | Escherichia coli | 2.00E−11 |
| ABC-transporter | tycD | PIR T31077 | Brevibacillus brevis | 1.00E−13 |
| PSCJ precursor | pscJ | EMB P95438 | Pseudomonas aeruginosa | 5.00E−13 |

I. 3 Membrane bioenergetics (electron transport chain)

| | | | |
|---|---|---|---|
| Proton ATPase beta subunit | EMB Q46585 | Desulfovibrio vulgaris | 1.00E−37 |

I. 4 Mobility and chemotaxis

| | | | | |
|---|---|---|---|---|
| Flagellar hook basal body protein | flgG | PIR C70372 | Aquifex aeolicus | 3.00E−24 |
| Flagellum-specific ATP synthase | | EMB O06682 | Treponema denticola | 3.00E−28 |
| Flagellar hook-associated protein | flgK | PIR E71297 | Treponema pallidum | 3.00E−11 |

I. 5 Protein secretion

| | | | | |
|---|---|---|---|---|
| Preprotein translocase SECA subunit | secA | SWP Q55709 | Synechocystis sp. | 8.00E−27 |
| Signal recognition particle protein | | SWP P37105 | Bacillus subtilis | 9.00E−25 |

I. 6 Cell division

| | | | | |
|---|---|---|---|---|
| Cell division protein FTSA | ftsA | SWP P47203 | Pseudomonas aeruginosa | 2.00E−11 |
| Cell division protein FTSH | ftsH | SWP P71377 | Haemophilus influenzae | 4.00E−42 |
| Cell division protein ALGI | algI | EMB O52196 | Azotobacter vinelandii | 9.00E−14 |

II Intermediary metabolism
II. 1 Metabolism of carbohydrates

| | | | | |
|---|---|---|---|---|
| Thioredoxin peroxidase | ytgI | PIR F69992 | Bacillus subtilis | 1.00E−26 |
| Pyruvate-ferredoxin oxidoreductase | | EMB P94692 | Desulfovibrio vulgaris | 4.00E−34 |

II. 2 Metabolism of amino acids and related molecules

| | | | | |
|---|---|---|---|---|
| Dihydroorotase | pyrC | PIR B70959 | Mycobacterium tuberculosis | 3.00E−14 |
| Porphobilinogen deaminase | | EMB O34090 | Pseudomonas aeruginosa | 2.00E−20 |
| Uroporphyrin-III C-methyltransferase | | SWP P29928 | Bacillus megaterium | 1.00E−25 |
| D-alanine-D-alanine ligase | ddlB | SWP P44405 | Haemophilus influenzae | 6.00E−15 |
| Glutamate decarboxylase alpha | dceA | SWP P80063 | Escherichia coli | 1.00E−44 |

II. 3 Metabolism of nucleotides and nucleic acids

| | | | | |
|---|---|---|---|---|
| Exodeoxyribonuclease V, alpha | | PIR D71564 | Chlamydia trachomatis | 9.00E−16 |
| CTP synthetase | pyrG | SWP P96351 | Mycobacterium tuberculosis | 2.00E−22 |
| Glutamyl-tRNA amidotransferase subunit | | PIR B70342 | Aquifex aeolicus | 3.00E−26 |
| Endonuclease I precursor | | SWP P25736 | Escherichia coli | 1.00E−17 |
| O-sialoglycoprotein endopeptidase | | SWP O66986 | Aquifex aeolicus | 5.00E−22 |
| dTDP-glucose 4, 6-dehydratase | | PIR H69105 | Methanobacterium | 1.00E−21 |
| | | | thermoautotrophicum | |
| Thiamine-phosphate pyrophosphorylase | | SWP P72965 | Synechocystis sp. | 4.00E−16 |

II. 4 Metabolism of lipids

| | | | | |
|---|---|---|---|---|
| 3-oxoacyl-(acyl-carrier protein) reductase | fabG | SWP O67610 | Aquifex aeolicus | 1.00E−25 |

III Information pathways
III. 1 DNA synthesis

| | | | | |
|---|---|---|---|---|
| DNA topoisomerase | | SWP P06612 | Escherichia coli | 1.00E−15 |
| DNA polymerase III subunit tau and | dnaX | SWP P43746 | Haemophilus influenzae | 1.00E−15 |
| gamma | | | | |

III. 2 RNA synthesis

| | | | | |
|---|---|---|---|---|
| ATP-dependent RNA helicase | srmB | SWP P21507 | Escherichia coli | 1.00E−53 |
| DNA-directed RNA polymerase, beta | | EMB AAF07229 | Salmonella typhimurium | 2.00E−18 |
| chain | | | | |
| Transcription antitermination protein | nusG | SWP P16921 | Escherichia coli | 5.00E−16 |

III. 3 Protein synthesis

| | | | | |
|---|---|---|---|---|
| 50S ribosomal protein L1 | | PIR C70466 | Aquifex aeolicus | 2.00E−27 |
| Prolyl-tRNA synthetase | | GEN 303557 | Escherichia coli | 1.00E−12 |
| Arginyl-tRNA synthetase | argS | SWP P46906 | Bacillus subtilis | 7.00E−11 |
| Tyrosyl-tRNA synthetase | tyrS | SWP P56417 | Helicobacter pylori | 7.00E−46 |
| Cysteine-tRNA ligase | | PIR D71108 | Pyrococcus horikoshii | 2.00E−17 |
| Proline-tRNA ligase | drpA | PIR B64744 | Escherichia coli | 4.00E−19 |

IV Other functions
IV. 1 Adaptation to atypical conditions

| | | | |
|---|---|---|---|
| ATP-dependent protease LA2 | SWP P36774 | Myxococcus xanthus | 1.00E−29 |

IV. 2 Phage-related functions

| | | | |
|---|---|---|---|
| Bacteriophage Mu major head subunit | EMB AAF01112 | Bacteriophage Mu | 9.00E−14 |

IV. 3 Miscellaneous

| | | | | |
|---|---|---|---|---|
| CAPL protein | capL | SWP P94692 | Staphylococcus aureus | 1.00E−30 |
| Heat shock protein HSLV precusor | hslV | SWP P39070 | Bacillus subtilis | 7.00E−15 |
| HYPF protein | hypF | EMB O07039 | Rhizobium leguminosarum | 5.00E−17 |
| Rubredoxin-like protein | | EMB P94698 | Desulfovibrio vulgaris | 4.00E−16 |

V. Hypothetical proteins

| | | | |
|---|---|---|---|
| Hypothetical protein MJ1665 | PIR G64507 | Methanococcus jannaschii | 2.00E−17 |
| Hypothetical 29.2 KD protein | SWP P37545 | Bacillus subtilis | 4.00E−18 |
| Hypothetical 15.6 KD protein | SWP Q99342 | Escherichia coli | 4.00E−11 |
| Hypothetical 70.4 KD protein | SWP P54123 | Synechocystis sp. | 2.00E−11 |
| Hypothetical 34.6 KD protein | SWP P45476 | Escherichia coli | 2.00E−17 |
| Hypothetical 45.9 KD protein | SWP P71607 | Mycobacterium tuberculosis | 3.00E−18 |
| Hypothetical protein sir 1117 | PIR S74480 | Synechocystis sp. | 1.00E−11 |
| Hypothetical 37.1 KD protein | EMB O69560 | Streptomyces coelicolor | 5.00E−17 |
| Hypothetical 34.6 KD protein | GEN P45476 | Escherichia coli | 4.00E−14 |
| Hypothetical protein 2 | PIR S60064 | Corynebacterium glutamicum | 1.00E−11 |

^{a}Threshold for significant homology; smallest sum probability <1.0e⁻¹⁰ using BLASTX on non-redundant GenBank, SwissProt, OWL, TrEMBL, PIR, and NRL.

[0100] As can be noted from Table 7, L. intracellularis contains sequences that exhibit homology to sequences from all three domains of life; Archaea, Bacteria, and Eukarya. The most common orthologs were from Bacteria, including Gram-negative as well as Gram-positive organisms and bacteria with a widely disparate level of G+C content.

[0101] The random sequencing approach identified several sequences in L. intracellularis that are of interest from a diagnostic, genetic, virulence or immunoprophylaxis standpoint. For instance, genes homologous to those encoding proteins involved in flagellar biosynthesis and assembly have been identified in our preliminary screen of the L. intracellularis genome (Table 7). These findings provide confirmation of the recent observations that some isolates of L. intracellularis possess a single polar flagellum. These observations are consistent with the fact that L. intracellularis displays a darting or directed motion when visualized in active cultures, and suggest a molecular mechanism by which the bacterium may accomplish this activity. Importantly, the identification of a flagellum in isolates of L. intracellularis, coupled with the sequences that correspond to regions of genes involved in flagellar assembly, provides us with a facile means of developing specific reagents to delineate its role in virulence and infectivity. It is noteworthy that flagellar structures are often highly immunoreactive, and it is well recognized from a variety of model systems that antibodies against flagella structures can lead to bacterial opsonization and killing; hence these genes may also be of interest from an immunoprophylaxis standpoint.

[0102] Preliminary sequence analysis also identified a L. intracellularis homolog to a membrane-bound Yop (Yersinia outer protein). The capacity of Yersiniae (Y. pestis, Y. pseudotuberculosis, and Y. enterocolitica) to resist the immune system of their host depends on the Yop virulon. This system allows extracellular bacteria adhering to the surface of eukaryotic cells to inject bacterial proteins into the cytosol of target cells in order to disarm them or disrupt their communications. Some Yops (e.g., effector Yops) may be injected directly into the target cells through a system known as type III targeting. Others may be excreted into the extracellular environment or remain associated with the bacterial membranes. An example of the latter is LcrV, a 41 kDa secreted protein that was described in the mid-1950s as a protective antigen of the plague bacillus, Y. pestis. LcrV is one of the major Yops that is known to be essential for virulence. While its exact role in the virulon is unclear, it is required for translocation of the others across the target cell membrane. It then helps to form a pore-like structure in the target cell membrane. Homologs of LcrV have been found in numerous bacterial pathogens that use this type III secretion mechanism for invasion or pathogenicity, including Salmonella sp. and Pseudomonas aeruginosa. Interestingly, the preliminary sequence analysis of L. intracellularis identified a homolog of LcrV (ortholog of the P. aeruginosa protein, PcrD), strongly suggesting that L. intracellularis is likely to contain a type III secretion system.

[0103] A third gene of potential importance in vaccine and immunodiagnostic reagent development is the L. intracellularis homolog of the major membrane protein D15 in H. pylori (also termed Oma87). The function of the D15/Oma87 protein family is not clear. D15/Oma87 has been shown, however, to have homologs and represent a major protective antigen in isolates of H. influenzae, P. multocida, and Shigella flexneri. Conservation of a homologous gene in such diverse species suggests that this gene is important. Anti-D15 antibodies were detected in eight of nine sera from patients recovering from H. influenza infection. Therefore, D15 and other newly identified targets may be of potential interest from a vaccine, diagnostic test, or drug development standpoint.

### Example 9

### DNA Hybridizations

[0104] Genomic DNA is extracted from several isolates of L. intracellularis using methods known in the art (see, for example, Diagnostic Molecular Microbiology: Principles and Applications, Persing et al. (eds), 1993, American Society for Microbiology, Wash. D.C). Briefly, Lawsonia are harvested by centrifugation at 8,000 rpm for 15 min and the pellet is resuspended in 11 ml of Qiagen buffer B1 containing 1 mg/ml Qiagen RNase A. Lipase is added (450,000 Units, Sigma Catalog No L4384) to digest cell wall lipids. Following incubation for 2 h at 37° C., 20 mg of lysozyme is added and incubation proceeds for an additional 3 h at 37° C. 500 μl of Qiagen proteinase K (20 mg/ml) is added and incubated for 1.5 h at 37° C. Qiagen buffer B2 (4 ml) is added and the slurry is mixed and incubated 16 h at 50° C. The remaining cellular debris is removed by centrifugation at 10,000 rpm for 20 min. The supernatant is poured over a pre-equilibrated Qiagen 500/G genomic tip. The loaded column is washed and processed according to the instructions of the manufacturer.

[0105] PstI restricted DNA fragments are separated on a 1% agarose gel. DNA-containing gels are depurinated, denatured, and neutralized as described by Sambrook et al. (1989, Molecular Cloning: A Laboratory Manual, Second Ed., Cold Spring Harbor Laboratory Press, Cold Spring Harbor, N.Y.). DNA is transferred by capillary action to BrightStar-Plus membranes (Ambion, Austin, Tex.) and probes are labeled using [α-³²P]dCTP (ICN, Cost Mesa, Calif.) by random priming. Hybridization is performed in a AUTOBLOT hybridization oven (Bellco Biotechnology, Vineland, N.J.) at 45° C. for 16 h in ExpressHyb hybridization solution (Clontech, Palo Alto, Calif.). Probed blots are washed sequentially with solutions increasing in stringency as follows: 2 washes at room temp in 2×SSC, 0.1% SDS; 2 washes at room temp in 0.2×SSC, 0.1% SDS; and 2 washes at room temp in 0.16×SSC, 0.1% SDS. Detection is by autoradiography at room temp using BioMax MR film (Kodak, Rochester, N.Y.) with a Kodak intensifying screen for less than 16 hours.

### Example 10

### PCR Amplification

[0106] The L. intracellularis genome was analyzed for the presence of variable number tandem repeat (VNTR) sequences using Tandem Repeat Finder software. From this analysis, four putative VNTR regions were found. Specific primer sequences were designed upstream and downstream of these regions using Primer 3 software. The sequence and positions of the primers used in the amplification reactions are shown in Table 8.

TABLE 8

| | Position | Repeat | | |
|---|---|---|---|---|
| Plasmid | Amplified | (copy #) | Left Primer | Right Primer |
| 1 | 18,951-18,988 | ATA | 5′-TTCTCA CAT | 5′-CCC CAC CTT |
| | of | (12) | TTT CAA ATC TTT | TT-3′ |
| | SEQ ID NO:8736 | | TTC-3′ | SEQ ID NO:8729 |
| | | | SEQ ID NO:8728 | |
| 3 | 194,585-194,619 | CA | 5′-TTG ACG TTA | 5′-TTG TAT ATT |
| | of | (17) | TCT TTA GCC TAC | CAA AAA GGT TCA |
| | SEQ ID NO:8738 | | CA-3′ | ATG TAA-3′ |
| | | | SEQ ID NO:8730 | SEQ ID NO:8731 |
| 3 | 130,523-130,562 | ATA | 5′-CAA CAC AAA | 5′-TCA TGC ATC |
| | of | (13) | ATA TCC CCT | GCA TCT TTT AAT |
| | SEQ ID NO:8738 | | TGG-3′ | TT-3′ |
| | | | SEQ ID NO:8732 | SEQ ID NO:8733 |
| 3 | 164,830-164,863 | CA | 5′-GGT TAC TAT | 5′-TGT GCC TGT |
| | of | (19) | TCT TAG GTT ATT | CTT TCT TGT AGT |
| | SEQ ID NO:8738 | | GCC AGA-3′ | GA-3′ |
| | | | SEQ ID NO:8734 | SEQ ID NO:8735 |

[0107] PCR amplification of L. intracellularis-specific nucleic acid molecules was performed as follows. A PCR reaction mix was generated that contained 2.5 μl of 10× buffer, 2.0 μl of a 10 mM dNTP mix, 1.0 μl of 25 mM MgCl₂, 1.0 μl L. intracellularis DNA, 3.0 μl of a 5 μM stock of the left primer, 3.0 μl of a 5 μM stock of the right primer, 0.15 μl polymerase, and 12.85 μl H₂O. The PCR reaction conditions were as follows: a 5 min denaturing step at 94° C., followed by 30 cycles of: 94° C. for 30 sec, 57° C. for 30 sec, and 72° C. for 1 min. At the end of 30 cycles, the samples were incubated at 72° C. for 10 min and then the reaction was held at 4° C. PCR amplifications generally used Taq DNA polymerase and the corresponding buffer (Roche Molecular Biochemicals, Indianapolis, Ind.).

### Example 11

### Expression of L. intracellularis Genes in E. coli

[0108] To confirm coding predictions of novel L. intracellularis genes and assess their immunogenicity, coding sequences are amplified from the genome by PCR and cloned into the pMAL-c2 E. coli expression plasmid. These proteins are expressed as a fusion with E. coli maltose binding protein (MBP) to enable affinity purification on an amylase resin column. An immunoblot is probed with a monoclonal antibody that binds MBP, which identifies each fusion protein. A duplicate immunoblot is probed with polyclonal sera from a rabbit immunized with a heat-killed preparation of L. intracellularis. Only the fusion protein containing a L. intracellularis-specific polypeptide should be detected by the rabbit sera, which indicates that the polypeptide is produced by L. intracellularis. The MBP protein was not detected by the polyclonal sera.

### Example 12

### Making a Vaccine

[0109] Coding sequences within L. intracellularis-specific DNA fragments are cloned into E. coli expression vectors (e.g., containing a sequence encoding a 6×His tag). Heterologously expressed L. intracellularis proteins are affinity purified from E. coli lysates by a polyhistidine tag. These purified proteins are then evaluated serologically with a panel of sera from infected and control pigs to determine if the protein is recognized by sera from infected animals.

[0110] Specifically, an open reading frame identified as unique to L. intracellularis is amplified from genomic DNA, cloned into the pCRT7 expression vector (Invitrogen), and transformed into E. coli DH5-α. Each of the constructs are verified by DNA sequence analysis. The level of expression of the gene of interest is evaluated by loading the recombinant E. coli lysates onto SDS-PAGE gels and staining them in Coomassie blue. Expressed proteins are purified from E. coli lysates using the vector-encoded polyhistidine tag that has affinity for metal ions. Column purification using TALON metal resin (Clontech) is used. The fusion alone is used as a negative control. Comparisons of the reactivity of a collection of pig antisera with the fusion proteins are conducted using a slot-blotting device (BioRad). Lysates of recombinant E. coli are loaded onto preparative 12% (w/v) polyacrylamide gels and transferred to nitrocellulose. After blocking, these filters are placed into the slot-blot device. Individual pig antisera, each diluted 1:200, is added to independent slots. The rest of the procedure is carried out using standard immunoblot protocols. Protein G-peroxidase diluted 1:25,000 or anti-pig IgG-peroxidase diluted 1:20,000 are used for detection of bound antibody.

### Example 13

### Production of Monoclonal and Oolyclonal Antibodies Against L. intracellularis-Specific Polypeptides

[0111] All expressed and purified L. intracellularis-specific polypeptides are used to immunize both BALB/c mice and New Zealand white rabbits. Standard immunization regimens are used in each instance. TiterMax or Freund's incomplete serve as the adjuvant. Splenic lymphocytes from the immunized mice are hybridized with myeloma cells for the production of monoclonal antibodies. ELISA is the method used to assay secreting hybridomas for reactivity to purified antigens. Hybridomas in positive wells are cloned and expanded using standard methods. Rabbit antisera is collected following boost injections of isolated polypeptide until a sufficient titer is obtained.

### Example 14

### ELISA Assays

[0112] Improvement in the specificity of the ELISA test for detection of proliferative enteropathy in animals (e.g., pigs) has always been a major goal. The purified L. intracellularis-specific polypeptide to be evaluated is diluted in PBS and added to 96-well microtiter plates. Plates with bound polypeptide are blocked in PBS containing 1% gelatin and then washed three times with PBS containing 0.05% Tween. Pig sera to be tested is diluted 1:400 in PBS, added to individual wells, and processed as a standard ELISA. Mouse anti-bovine IgM or mouse anti-bovine IgG is the second antibody in these assays. Results generally show that the use of a biotinylated second antibody followed by streptavidin/alkaline phosphatase and enzyme detection can enhance test sensitivity 8 to 16-fold (based on antibody titers) as compared to the standard direct ELISA.

[0113] For all evaluations, it is necessary to include samples from known negative animals to assess specificity. In addition, because of potential cross-reactivity that may be encountered with other bacteria, especially other L. intracellularis, sera from animals known to be naturally or experimentally infected with other L. intracellularis, are included.

### Example 15

### Use of Antibodies Against L. intracellularis-Specific Polypeptides in Immunohistochemical Diagnosis of Infected Pig Tissues

[0114] Histopathologic analysis of tissues from infected animals can be used to detect L. intracellularis. However, these methods are non-specific and do not distinguish among isolates. Therefore, pig tissues from L. intracellularis-infected and -uninfected animals are tested by histopathologic analysis using high-titer antibodies directed at L. intracellularis-specific polypeptides. Briefly, tissue samples from pigs are fixed in buffered formalin, processed routinely, and embedded in paraffin wax. 6 μm cut sections are stained with hematoxylin and eosin or Ziehl-Neelsen by conventional methods. Replicate unstained sections are prepared for immunohistochemistry. Sections that are immunostained are deparaffinized, rehydrated and blocked using routine methods (Stabel et al., 1996, J. Vet. Diagn. Invest., 8:469-73). Blocked sections are incubated with L. intracellularis-specific antibodies developed in the above-described studies. Depending on the nature of the primary antibody, either goat anti-rabbit biotinylated antibody or goat anti-mouse biotinylated antibody is added followed by washing instreptavidin-alkaline phosphatase solution. The tissue is stained with chromogen, and Histomark Red. Results are visualized under a bright-field microscope. Staining intensities are quantitatively compared among the different infected and uninfected tissues.

### Example 16

### Detection of L. intracellularis by PCR Amplification

[0115] Detection and identification of L. intracellularis isolates using oligonucleotide primers complementary to L. intracellularis-specific nucleic acid sequences was examined by PCR.

[0116] L. intracellularis isolates of geographic and temporal diversity (PHE/MN1-00, VPB4, 15540D, 963/93, foal/96, and hamster-1) were used to determine if there was inter-strain variability among isolates of L. intracellularis by amplifying VNTR regions of the genome. To assess if the VNTR profiles were conserved and stable in a specific isolate, an isolate was tested prior to cultivating in cell culture, after low- and high-passage cell culture, and after serial passage through a pig. In addition, 100 fecal samples from 4 different proliferative enteropathy outbreaks were tested by extracting genomic DNA from the fecal sample in the absence of prior cultivation. Each DNA sample was subjected to four different rounds of polymerase chain reaction (PCR) amplification using the four respective primer sets. PCR products were then sequenced using an ABI 3100 automated fluorescent DNA sequencer. The number of tandem repeats for each loci were calculated, creating a VNTR profile for each sample.

[0117] Table 9 shows that the six L. intracellularis isolates contained different numbers of each of the VNTRs examined. These results indicate, therefore, that there is identifiable genomic differences between L. intracellularis isolates. The VNTR profile of L. intracellularis obtained directly from a diseased intestine was identical to that obtained after purification and inoculation into cell culture, after low passage, and after serial passage through a pig. Thus, the VNTR regions described herein remain stable and conserved under various conditions. Samples from separate herd experiencing proliferative enteropathy outbreaks showed unique VNTR profiles; however, samples within the same outbreak shared identical profiles.

TABLE 9

| | No. of VNTRs/L. intracellularis isolate | | | | | |
|---|---|---|---|---|---|---|
| VNTR | | | | | Foal/ | |
| (Genetic Element) | 963/93 | 15540D | PHE | VPB4 | 96 | Hamster-1 |
| CA(17) | 16 | 10 | 17 | 15 | 13 | 13 |
| (3) | | | | | | |
| ATA(13) | 12 | 10 | 13 | 11 | 5 | 5 |
| (3) | | | | | | |
| CA(19) | 16 | 17 | 19 | 16 | 16 | 13 |
| (3) | | | | | | |
| ATA(12) | 9 | 8 | 12 | 9 | 10 | 13 |
| (1) | | | | | | |

[0118] VNTRs contain a high level of polymorphism, resulting in a high discriminatory capacity. Based on results in the present study, analysis of VNTR profiles appears to be a useful tool for distinguishing between strains or isolates of L. intracellularis. The assay proved to be robust and gave identical results upon repeat analysis. This method of rapidly detecting L. intracellularis and tracing specific isolates may be used epidemiologically to allow rapid identification of the source of an infection and thereby reduce the rate of transmission.

### Example 17

### Annotation of L. intracellularis Genetic Elements

[0119] The sequencing and assembly strategies used herein for L. intracellularis were as described for Pasteurella multocida (see May et al., 2001, Proc. Natl. Acad. Sci. USA, 98:3460-5). For these studies, assembled L. intracellularis contig fragments greater than 10 kb were chosen. Predicted coding sequences were identified using ARTEMIS software and TB-parse (Cole et al., 1998, Nature, 393:537-44). The TB-parse results were compared and verified manually in ARTEMIS. A putative ribosome-binding site (RBS) was also evaluated for each coding sequence. The presence of an AG-rich sequence approximately 30-bp upstream of the start codon was scored as a putative RBS sequence. Similarities were identified with BLASTP analysis by using GenBank and a local database constructed by the Computational Biology Center at the University of Minnesota (http://www.cbc.umn.edu).

[0120] ARTEMIS and ACT are funded by the Wellcome Trust's Beowulf Genomics initiative and are available free on the internet at http://www.sanger.ac.uk/Software/. Sequence alignments to produce figures or schematic illustrations were performed with AssemblyLIGN™ software (Accelrys, Princeton, N.J.).

### Example 18

### Analysis of the L. intracellularis Genome

[0121] A shotgun strategy was adopted to sequence the genome of L. intracellularis. To create a library having an insert size of 1.5- to 3.0-kb, genomic DNA from a L. intracellularis PHE isolate was isolated using a chloroform/cetyltrimethylammonium bromide-based method and DNA was sheared by nebulization and cloned into a pUC18 plasmid vector for shotgun sequence analyses essentially as described (May et al., 2001, Proc. Natl. Acad. Sci., USA, 98:3460-5). The resulting clones were sequenced from both ends using Dye-terminator chemistry on ABI 3700 and 3100 (Applied Biosystems) sequencing machines. Sequence assembly and verification were accomplished by using the phredPhrap and Consed suite of software (http://genome.washington.edu). In order to close the final gaps at the end of the shotgun phase, several methods were used, including primer walking and random PCR. The final sequence showed that the L. intracellularis genome consisted of 4 genetic elements (3 plasmids and 1 chromosome).

[0122] The sequence of each L. intracellularis genetic element is shown in Tables 10, 11, 12, and 13, which are contained on the appended compact disc, which has been incorporated by reference herein. Table 10 contains the sequence of plasmid 1 (genetic element 1; SEQ ID NO:8736), which is 27,048 nt in length and has a % GC content of 29.05%. Table 11 contains the sequence of plasmid 2 (genetic element 2; SEQ ID NO:8737), which is 39,794 nt in length and has a % GC content of 29.23%. Table 12 contains the sequence of plasmid 3 (genetic element 3; SEQ ID NO:8738), which is 194,553 nt in length and has a % GC content of 32.91%. Table 13 contains the sequence of the chromosome (genetic element 4; SEQ ID NO:8739), which is 1,457,619 nt in length and has a % GC content of 33.28%.

[0123] Potential coding sequences (CDSs) in the genome were predicted by using GLIMMER, and ARTEMIS, and the results were compared and verified manually in ARTEMIS. Tables 14, 15, 16, and 17 (contained on the appended compact disc, which has been incorporated by reference herein) describe the annotation of the L. intracellularis sequences for genetic elements 1, 2, 3, and 4, respectively. Tables 18, 19, 20, and 21 (contained on the appended compact disc, which has been incorporated by reference herein) describe the nucleotide sequence of each predicted CDS for genetic elements 1, 2, 3, and 4, respectively. Tables 22, 23, 24, and 25 (contained on the appended compact disc, which has been incorporated by reference herein) describe the predicted amino acid sequences encoded by each predicted CDS for genetic element 1, 2, 3, and 4, respectively.

### Example 19

### Real-Time PCR

[0124] A PCR master mix is prepared containing the following: 1×TaqMan Buffer A (Perkin Elmer), 5.0 mM MgCl₂, 1.25 units per reaction Amplitaq Gold, 200 μM dATP, 200 μM dCTP, 200 μM dGTP, 400 μM dUTP, 5% DMSO, 0.01 units per reaction UNG, 100 μM of each primer, and 150 μM of each probe. Five μl of template DNA is placed in each PCR reaction tube, and 45 μl of Master mix is added. PCR samples are subject to initial denaturation at 50° C. for 10 minutes and then at 95° C. for 10 minutes; 40 amplification cycles of 94° C. for 30 seconds, 60° C. for 30 seconds, and 72° C. for 1 minute; a final extension at 72° C. for 7 minutes; and a soak at 25° C. Specific PCR products are detected using the ABI Prism 7700 or 7900HT Sequence Detection System (Applied Biosystems, Inc.). Results are recorded as Delta-RQ, which is the difference in the Rn values from the samples and the no-template control. The Rn values are the ratio of reporter emission to quencher emission. Agarose gel electrophoresis with ethidium bromide staining is performed to verify the results of the TaqMan assay. All assays are performed in duplicate.

[0125] To evaluate the sensitivity of the assay, ten-fold dilutions of L. intracellularis strain PHE cells were spiked into a negative fecal sample collected from a known L. intracellularis-free pig farm. L intracellularis DNA amounts used for template range from 100 ng to 1 fg. DNA is extracted from the spiked samples using a QIAamp DNA Stool Mini Kit, and the sensitivity of the assay for detecting L intracellularis in fecal samples is assessed by PCR as described above.

[0126] The specificity of the assay is evaluated using template DNA from other Lawsonia and non-Lawsonia spp. In addition, the TaqMan assay is compared to conventional PCR.

### Example 20

### Use of Real-Time PCR for Detection and Quantitation of L. intracellularis

[0127] A real-time PCR assay is developed for detection and quantitation of L. intracellularis. Primers and probes are designed based on a novel unique sequence. To increase sensitivity, two sets of primer-probe combinations are tested and used in the TaqMan assay as a multiplex strategy to amplify fragments of the unique L. intracellularis sequence. Assay conditions are optimized for MgCl₂, primer, and probe concentrations in the reaction mix; in related experiments, optimal concentrations are found to be 5.0 mM MgCl₂, 100 nM each primer, and 150 nM each probe.

[0128] To quantitate standard L. intracellularis, curves resulting from amplification of known amounts of L. intracellularis DNA (100 ng to 1 fg) are generated. A regression line is generated from the data points, and the correlation coefficient (R²) value is determined. The ability to employ the TaqMan approach for quantitation of L. intracellularis also is determined. For example, a sample containing a “blinded” number of L. intracellularis cells can be analyzed using real-time PCR and calculations can be performed to approximate the number of cell equivalents that were spiked into the sample.

[0129] Known amounts of L. intracellularis PHE genomic DNA are used to test the sensitivity of the real-time PCR assay. DNA concentrations ranging from 100 ng to 1 fg result in Ct values. The cut-off point for accurate detection of L. intracellularis PHE DNA is determined and correlated with cell equivalents of L. intracellularis. Ten-fold dilutions of L. intracellularis PHE cells spiked in feces also are used to determine the sensitivity of the assay.

[0130] The specificity of the TaqMan assay is tested using different L. intracellularis isolates, for example, from different animal species, and isolates representing non-L. intracellularis species.

### Example 21

### Representative Nucleic Acid and Polypeptide Sequence

[0131] The following polypeptide sequence (SEQ ID NO:8740) has homology with hemolysins from Synechosystis sp. and Nostoc sp., and is encoded by the following nucleic acid sequence (SEQ ID NO:8741). The following nucleic acid sequence (SEQ ID NO:8741) contains the coding sequence as well as approximately 50 nucleotides upstream and downstream of the coding sequence.

(SEQ ID NO:8740)

MIILLGTVFLIVLISALCSMMEAAIYSIPITYIEHLREQGSKKGEKLYYLHSNDQPITA
VLILNTIANTAGAALAGAIATTTLHESTMPFFAAILTLLILAFGEIIPKTLGVAYSKRIAI
ILLNPLCILIVTLKPLIMLSSYLTRLVSPRKRPTVTEDDIRALTSLSRESGRIKPYEEHVI
KNILSLDLKYAHEIIMTPRTMVFSLHENLTVSEAYSNPKIWNYSRTPTYGENNEDITGII
QRYEIGRYMTNGETEKKLLEIIMQPAKFVLESQTVDHLLLAFLEERQHLFIVLDEYGG
LSGVVSLEDVLETMLGREIVDESDTTPDLRALAKiKRHSALIQNM(NTLLK

(SEQ ID NO:8741)

caagctataataacttacgctatgttagcagcacttctaattagagcaatttattaggacaataatcatgataatccttttaggaactgtttttc
ttattgttcttatctctgcattatgctcaatgatggaagctgctatatactctatccctattacttatattgaacaccttcgtgaacagggaagc
aaaaaaggagaaaaactttattatttacatagtaatattgatcagcctattacagccgtattaatattgaatactatagcaaatactgctgga
gctgcccttgctggagcaattgctacaacaacacttcatgaatctactatgcctttctttgcagcaatcctcaccttgcttattttagcttttgg
ggaaattatacctaaaacactaggtgttgcttactctaaacgtattgctataattctccttaatcctctctgtattcttatagttactttaaaaccc
cttattatgctttcaagctacttaacacgacttgtttcacctcgaaaacgtcctacagttacagaagatgacatccgtgcacttacaagtcttt
ccagagagtctggtcgtattaagccatatgaagaacatgtcataaaaaatatccttagtcttgatttaaaatatgctcatgaaattatgactc
ccagaactatggtcttttcacttcatgaaaaccttactgtctctgaagcttatagcaaccccaaaatatggaactatagtcgcatccctactt
atggagaaaataacgaagacattactggcattatccaacgatatgaaattggacgatatatgaccaatggagaaacagaaaaaaaactt
ttagaaattatgcaaccagcaaaatttgtccttgaaagtcaaactgtagatcatttacttcttgcatttttagaagaaagacaacatctttttatt
gtacttgatgagtatgggggattatctggtgttgtttccttagaagatgtattagaaactatgcttggaagagaaattgttgatgaaagtgat
acaacacctgatcttagagcacttgcaaaaaaaagacatagtgcattaatccaaaataataaaaatactcttttaaaataacagaaatata
cctttactctctaataagtattaatataacttaaagtgtaagctgaaacacctttcaaaataaag

[0132] The following polypeptide sequence (SEQ ID NO:8742) has homology with a hemolysin from Desulfovibrio desulfuricans, and is encoded by the following nucleic acid sequence (SEQ ID NO:8743). The following nucleic acid sequence (SEQ ID NO:8743) contains the coding sequence as well as approximately 50 nucleotides upstream and downstream of the coding sequence.

(SEQ ID NO:8742)

MAKHKVRADELVFLQGLAESREQAKRLIMAGKVTLTNNSTTIPLRLEKPGHKYPLES
ICSLIGVERFVSRGAYKILTALDFFKIDVKSCICLDAGASTGGFTDCLLQHGASKVYA
IDVGKGQLHEKLYTNEQVINIEGVNLRTASKDLWEEVDILTTDVSFISLTLILPSCIRWL
KASGIHALTKPQFELYPDKIKKGVVKETSLQYEAVEKIIHFCQSELGLIFIGVVPSVIKG
PKGNQEYLIYLKKR

(SEQ ID NO:8743)

tatgactagcaagctaatatttatgtgttatattatcactatatatttttataaataataagatgagaagaaagaatggccaaacataaagtac
gtgctgatgaacttgtttttttacaagggttagcagaaagtcgtgaacaagctaaacgacttattatggcaggtaaggttacattaactaat
aattctacaactataccattacgtttggaaaaaccaggacataaatatccattagaaagtatctgcagtttaataggggtagaacgttttgt
gagtagaggagcatataagctattaactgctctagatttttttaaaattgatgtaaaaagttgtatttgtcttgatgcaggcgcatctactggt
gggtttacagattgtcttttacaacatggagcatctaaagtatatgcgattgatgtaggcaaaggtcaattacatgagaaactgtatactaa
tgaacaagttataaatattgagggagtgaatttacgtacagcatctaaagatcttattcctgaagaagtagatattttaactattgatgtttctt
ttatatcgcttactttgattttaccgtcatgtatacgttggctaaaggcttccggaattattattgccttaataaagcctcaatttgaattatatcc
agataaaataaaaaaaggtgtagtaaaagaaactagcttgcaatatgaagcagtagaaaaaattattcatttttgtcaatcagaacttgga
cttatatttattggtgttgttccgtcggtaataaaaggtccaaaaggaaatcaagaatatcttatttacttgaaaaaacgttaataatacttatt
ataatttgtattctatattatgtaggtatataaatataaagaggtatgatta

[0133] Table 26 contains relevant information regarding SEQ ID NOs:8741 and 8743, and corresponds in content to Tables 2, 3, 4, and 5.

| SEQ | | |
|---|---|---|
| ID | N | |
| NO: | (nt) | Organisms |
| 8741 | 29 | Homo sapiens, Rattus norvegicus, Mus musculus, Clostridium tetani E88, |
| | | Clostridium sticklandii, Fusobacterium nucleatum subsp. nucleatum ATCC25586, |
| | | Streptococcus pneumoniae, Oryza sativa, Haenianthus salicifolius var. |
| | | obovatus, Haenianthus incrassatus, Danio rerio, Arabidopsis thaliana, |
| | | Drosophila melanogaster, Caenorhabditis elegans, Grapevine leafroll- |
| | | associated virus, M. capricolum, Utricularia laciniata |
| 8743 | 33 | Mus musculus, Clostridium acetobutylicum ATCC824, Plasmodium |
| | | falciparum, Homo sapiens, Cryptosporidium parvum, Danio rerio, |
| | | Melanoplus sanguinipes entomopoxvirus, Dictyostelium discoideum, |
| | | Arabidopsis thaliana, Marchantia polymorpha, E. histolytica, Ciona |
| | | intestinalis, Oryza sativa, Lotus corniculatus var. japonicus, Yaba monkey |
| | | tumor virus, Entamoeba histolytica, Drosophila melanogaster, Xenopus |
| | | laevis, Caenorhabditis elegans, Photorhabdus luminescens subsp. laumondii |

### Other Embodiments

[0134] It is to be understood that while the invention has been described in conjunction with the detailed description thereof, the foregoing description is intended to illustrate and not limit the scope of the invention, which is defined by the scope of the appended claims. Other aspects, advantages, and modifications are within the scope of the following claims.

What is claimed is:

1. An isolated nucleic acid, wherein said nucleic acid comprises a nucleic acid molecule of at least 10 nucleotides in length, said molecule having at least 75% sequence identity to SEQ ID NO:8741 or to the complement of SEQ ID NO:8741, wherein any said molecule that is 10 to 29 nucleotides in length, under standard amplification conditions, generates an amplification product from L. intracellularis nucleic acid using an appropriate second nucleic acid molecule, but does not generate an amplification product from nucleic acid of any of the organisms selected from the group consisting of Homo sapiens, Rattus norvegicus, Mus musculus, Clostridium tetani E88, Clostridium sticklandii, Fusobacterium nucleatum subsp. nucleatum ATCC 25586, Streptococcus pneumoniae, Oryza sativa, Haenianthus salicifolius var. obovatus, Haenianthus incrassatus, Danio rerio, Arabidopsis thaliana, Drosophila melanogaster, Caenorhabditis elegans, Grapevine leafroll-associated virus, M. capricolum, and Utricularia laciniata using an appropriate third nucleic acid molecule.

2. The nucleic acid of claim 1, wherein said nucleic acid molecule has the sequence shown in SEQ ID NO:8741.

3. The nucleic acid of claim 1, wherein said nucleic acid molecule has at least 75% sequence identity to SEQ ID NO:8741.

4. The nucleic acid of claim 1, wherein said nucleic acid molecule has at least 80% sequence identity to SEQ ID NO:8741.

5. The nucleic acid of claim 1, wherein said nucleic acid molecule has at least 85% sequence identity to SEQ ID NO:8741.

6. The nucleic acid of claim 1, wherein said nucleic acid molecule has at least 90% sequence identity to SEQ ID NO:8741.

7. The nucleic acid of claim 1, wherein said nucleic acid molecule has at least 95% sequence identity to SEQ ID NO:8741.

8. The nucleic acid of claim 1, wherein said nucleic acid molecule has at least 99% sequence identity to SEQ ID NO:8741.

9. A vector comprising the nucleic acid of claim 1.

10. A host cell comprising the vector of claim 9.

11. An isolated polypeptide encoded by the nucleic acid of claim 1.

12. The isolated polypeptide of claim 11, wherein said polypeptide has the amino acid sequence shown in SEQ ID NO:8740.

13. An article of manufacture, wherein said article of manufacture comprises the polypeptide of claim 11.

14. An antibody, wherein said antibody has specific binding affinity for the polypeptide of claim 11.

15. A method for detecting the presence or absence of L. intracellularis in a biological sample, comprising the steps of:
contacting said biological sample with at least one nucleic acid under standard amplification conditions, wherein said nucleic acid comprises a nucleic acid molecule of at least 10 nucleotides in length, said molecule having at least 75% sequence identity to SEQ ID NO:8741, wherein an amplification product is produced if L. intracellularis nucleic acid is present in said biological sample; and
detecting the presence or absence of said amplification product,
wherein the presence of said amplification product indicates the presence of L. intracellularis in the biological sample, and wherein the absence of said amplification product indicates the absence of L. intracellularis in the biological sample.

16. The method of claim 15, wherein said biological sample is derived from pigs, hamsters, foals, dogs, deer, fox, rabbits, rats, emus, ostriches, non-human primates, and humans.

17. The method of claim 15, wherein said biological sample is a fecal sample and a blood sample.

18. A method for detecting the presence or absence of L. intracellularis in a biological sample, comprising the steps of:
contacting said biological sample with at least one nucleic acid under hybridization conditions, wherein said nucleic acid comprises a nucleic acid molecule of at least 10 nucleotides in length, said molecule having at least 75% sequence identity to SEQ ID NO:8741, wherein a hybridization complex is produced if L. intracellularis nucleic acid is present in said biological sample; and
detecting the presence or absence of said hybridization complex,
wherein the presence of said hybridization complex indicates the presence of L. intracellularis in said biological sample, and wherein the absence of said hybridization complex indicates the absence of L. intracellularis in said biological sample.

19. The method of claim 18, wherein nucleic acids present in said biological sample are electrophoretically separated.

20. The method of claim 19, wherein said electrophoretically separated nucleic acids are attached to a solid support.

21. The method of claim 20, wherein said solid support is a nylon membrane or a nitrocellulose membrane.

22. The method of claim 18, wherein said one or more nucleic acids are labeled.

23. The method of claim 18, wherein said biological sample is selected from the group consisting of a fecal sample and a blood sample.

24. A method for detecting the presence or absence of L. intracellularis in a biological sample, comprising the steps of:
contacting said biological sample with the polypeptide of claim 11, wherein a polypeptide-antibody complex is produced if an antibody having specific binding affinity for said polypeptide is present in said sample; and
detecting the presence or absence of said polypeptide-antibody complex,
wherein the presence of said polypeptide-antibody complex indicates the presence of L. intracellularis in said biological sample, and wherein the absence of said polypeptide-antibody complex indicates the absence of L. intracellularis in said biological sample.

25. The method of claim 24, wherein said polypeptide is attached to a solid support.

26. The method of claim 24, wherein said biological sample is selected from the group consisting of a fecal sample and a blood sample.

27. A method for detecting the presence or absence of L. intracellularis in a biological sample, comprising the steps of:
contacting said biological sample with the antibody of claim 14, wherein an antibody-polypeptide complex is produced if a polypeptide is present in said biological sample for which said antibody has specific binding affinity, and
detecting the presence or absence of said antibody-polypeptide complex,
wherein the presence of said antibody-polypeptide complex indicates the presence of L. intracellularis in said biological sample, and wherein the absence of said antibody-polypeptide complex indicates the absence of L. intracellularis in said biological sample.

28. The method of claim 27, wherein said antibody is bound to a solid support.

29. The method of claim 27, wherein said biological sample is selected from the group consisting of a blood sample or a milk sample.

30. A method of preventing infection by L. intracellularis in an animal, comprising the steps of:
administering a compound to said animal, wherein said compound comprises the polypeptide of claim 11,
wherein said compound immunizes said animal against L. intracellularis.

31. A method of preventing infection by L. intracellularis in an animal, comprising the steps of:
administering a compound to said animal, wherein said compound comprises a nucleic acid, wherein said nucleic acid comprises a nucleic acid molecule of at least 10 nucleotides in length, said molecule having at least 75% sequence identity to SEQ ID NO:8741,
wherein said compound immunizes said animal against L. intracellularis.

32. A composition comprising a first oligonucleotide primer and a second oligonucleotide primer, wherein said first oligonucleotide primer and said second oligonucleotide primer are each 10 to 50 nucleotides in length, and wherein said first and second oligonucleotide primers, in the presence of L. intracellularis nucleic acid, generate an amplification product under standard amplification conditions, but do not generate an amplification product in the presence of nucleic acid from an organism other than L. intracellularis.

33. An isolated nucleic acid, wherein said nucleic acid comprises a nucleic acid molecule greater than 10 nucleotides in length, said molecule having at least 75% sequence identity to SEQ ID NO:8741 or to the complement of SEQ ID NO:8741, wherein said molecule hybridizes under stringent conditions with L. intracellularis nucleic acid but does not hybridize with nucleic acid from an organism other than L. intracellularis under the same hybridization conditions.

34. An article of manufacture, wherein said article of manufacture comprises the composition of claim 32.

35. An article of manufacture, wherein said article of manufacture comprises the isolated nucleic acid of claim 1.

The application's sequence listing, which the Patent Office published only in electronic form, follows.

SEQUENCE LISTING (11433 sequences)

SEQ ID NO: 1 - DNA, 740 bp, Lawsonia intracellularis
ccgcgggcggcctactttacccagcagcagatggtcatgggcttccaccagcgaaattgcggtgcctttacgaccggcgcgcgcggtacgtccgatacggtgcaaataagtatcgccactgcgcggcatatcgaagttaaagacgtggctgacgtcaggaatgtcgataccgcgcgcggcaacatcggttgcgaccagtacgtttacgcgaccttcggtcaaacgcttgatcgcttcgttacgcttgccctgtaccatctcaccttcgagatagcagttgttgatgcccgcttcgcgcagccagtttgccagctcatgcacacgctcacgcttacgcacaaacacaattgagcgggtcgcttccggctgttttaacagatgcaccagcaacgcggttttatgctcaagatcatcggcgcggtaataccactgatgaatttttttgcgctcacggctggagggattggcagataacttcaccggatctttcagcagacgctcggcaaagtcctgaatcgcatcgccttccaacgttgccgaaaagagcaggtttgttacgccaccgcgtttcccagcaatatttcgttttcttggcgacacaaaaagctggcgagcacctgtgctgtcgatttgggcgcaacattttggcgctttgtcagccgaaaccttttgtggctacctccaagggaccgttttcttctaagccctgtttccctgggggacctcgcgcatttaatgtg

SEQ ID NO: 2 - DNA, 729 bp, Lawsonia intracellularis
  misc_feature (1)...(729): n = A,T,C or G
gtcagcaggttgaaccataggcattaaaatttcttccgcacctattctattcatctcacttcttataatagatatcgctttattaagcgtctttagccccaatggtaaccatgtataaatacctgaagtaagtttacgaatcattccagcacggattaataattcatgactaagcaattcagcatcaccaggcgcttcttttaatgtagggatataacactgcgaccaacgcataatgacctcaaattattataatagtttaatacaataaaaatagtatctgaaaatggatagttacttttcaaactgtttcttaatatgacctgaacaacaaaaaagatttattttgttatattaaatattgtgaggtgaacgtcgagctcgaaaacgtttttcaataccacggtcaacagcacttttgtatcgtgcccattctggtgctacaagctctttttgaagagggtcagctacgactctatgaatcacaatatcttgacgtaacctatattatgatttaacagcaagaaccccttaaggnnnnnnnnnnnnnnnnnnnnnnnnnnnnnnnnnnnnnnnnnnnnnnnnnnnnnnnnnnnnnnnnnnnnnnnnnnnnnnntacgcttgcacaattccaatttgccagtgcttatattgaaaggccgaccaatcgccttcaacattgcaanctgaaggtaagggccgacgggatctttcttacatttgcgattn

SEQ ID NO: 3 - DNA, 778 bp, Lawsonia intracellularis
  misc_feature (1)...(778): n = A,T,C or G
gagtgttggcaagaacatcagacaactcgagaactaatggtgtttcttcaaccttacggtattagtgttacttatgcagtaaagatatataagtattatggtcagcagtctttaaatatagtaaaagaaaatccttatagattagcaatggatattcatggaatagggtttcttacagcagatgcactagccacaaaattaggatttgaaaaagataatcctttgcgagcccaagcaggaatattatatactcttttaaagtgtatggatgaaggacatgtttattatccaaaagaagcttttatagagcttactagtcataatcttggtattgatcatcagtgcatagaggatgctatagaacatcttaagagagaagaaagaattgtttgtgaagcattggatgaacatattggaatttatttaaatcgctatcaccattacgaatctcaaattgcgttttatttacagcgaattctacattcaccaaaatcagtacaatttaaaaatacagatgataccatttcacaggttatcaataaacttaatatcactctagctccagaacagatgagtgctatagtaacgtctactacatcaaagattatnnnnnnnnnnnnnnnnnnnnnnnnnnnnnnnnnnnnnnnnnnnnnnnnnnnnnnnnnnnnnnnnnnnnnnnnnnnnnnnnnnnnnnnnnnnnnnnngctttgaaaaaaaccctttgcagttgggtaatacaaaaggccacccatgcccttcaaacattgcaacggatggn

SEQ ID NO: 4 - DNA, 787 bp, Lawsonia intracellularis
  misc_feature (1)...(787): n = A,T,C or G
ctcggtacccggggatcaagaagaacagcaggtagcatgttttgacctttagagtacatgtaacttatttgacgttttaacgcacttcggacatattctgtgagcataacagtatctttttctttagggctccactcaataagagcctcaaggatacttcttaagtcacgtatagaaatttgttcttgtacaagacgttggaaaatttcagcaattctttgtacaggtaataatcgagttgtttctctaaccaaatcaggagcacgttcttccattttatccaagagatattttgtttcttgcatgcccagaaagtttgaagcatggcgtgaaaggacaagggataagtggtaagcaagaatgcgactatgtgtcatacatgttattcctgcccgttcaagcaatgcttttttagagtctggaacccaaagagactcaacatctggaagaaaattttctttttcttcaggttccactccaagcattgccaaattttcttttgtatccctttgctagaccatacccttttcaagtgttcctttgggtttaggaatctcaataatcattaaggaataagtaaggtcatgtagctttgatgagatgcgaagattaatgccagggaatggttcacaaagatcctctgagtcaacctgcagcatgcaaacttggccttgcccgnnnnnnnnnnnnnnnnnnnnnnnnnnnnnnnnnnnnnnnnnnnnnnnnnnnnnnnnnnnntttgcagttgcgtataccgagaggcggacgtcgccttccacattggacg

SEQ ID NO: 5 - DNA, 734 bp, Lawsonia intracellularis
  misc_feature (1)...(734): n = A,T,C or G
gtttgtaattgtcggatagcttcaaggaatggaagtccttcaatatccccaatagtgcctccaatttcaatgatagcaatatccggagtattattgtctatggaactttttgcaaggcttaatattgttgacttaatttcatctgtaatatgtgggataacctgtactgtggcaccaagatagtcaccacgacgttctttactaataactttgtaataaatggctcctgaagtggagttattcttttgtgaaagcgaggtaccaagaaaccgttcataatgtccaagatcaagatctgcttcagcaccgtcatcagtgacataaacttcaccatgctggtatgggttcattgtaccannnnnnnnnnnnnnnnnnnnnnnnnnnnnnnnnnnnnnnnnnnnnnnnnnnnnnnnnnnnnnnnnnnnnnnnnnnnnnnnnnnnnnnnnnnnnnnnnnnnnnnnnnnnnnnnnnnnnnnnnnnnnnnnnnnnnnnnnnnnnnnnnnnnnnnnnnnnnnnnnnnnnnnnnnnnnnnnnnnnnnnnnnnnnnnnnnnnnnnnnnnnnnnnnnnnnnnnnnnnnnnnnnnnnnnnnnnnnnnnnnnnnnnnnnnnnnnnnnnnnnnnnnnnnntgatcccattattagcaatcccgacaccgcaacaccgttgaccgcctgacggttgttgcttcgcatcgttaagacaacttgaccttccgagctgatgttaaggttta

SEQ ID NO: 6 - DNA, 748 bp, Lawsonia intracellularis
  misc_feature (1)...(748): n = A,T,C or G
gatatagtggttccagaaccaagaaatgcattgatttcttctttactcacagtaaattctccaccctagttttattaataacttttgaatacaaacctacgcattgaaatattaagtacaaggcctattaaaataaagtttacaagcgttgcactaccgccataacttagaaatggtaatggaataccaactactggcataagaccaagaaccataccaatattaacaaagaattgccagaaaaaatacataaaaattccggcagctaatgtacttccaaaacgatcttttgcaccttttactgtgttaaaaatacctaataggaaaagacaaaacaatcccataagagttatacagcctaaaaatccccactcctctccaaatacagcaatagcaaagtctgtatgtttctcaggtaaaaagcgaaattggctttgagttccttgaagaaaaccttttcctgagaattgtcctgaaccaatagctatctgtgattgaataatgtggtatccagatcctcgannnnnnnnnnnnnnnnnnnnnnnnnnnnnnnnnnnnnnnnnnnnnnnnnnnnnnnnnnnnnnnnnnnnnnnnnnnnnnnnnnnnnnnnnnnnnnnnnnnnnnnnnnnnnnnnnnnnnnnagttgtggtaaaacgataggcccccacatatgccttttcaaaatttgcaaccttatagcgatgggccttaagcgttttccttaccattgtgcggtttaacccaattg

SEQ ID NO: 7 - DNA, 767 bp, Lawsonia intracellularis
  misc_feature (1)...(767): n = A,T,C or G
ctcggtacccggggatctgtagctaacatatcaattattccagttttaatagcctctctcaaagccataatatcttcttgtgttctcagcggtggattgaccttagcatttgtattataccctattacagccctctcatctaataacaaataatgtggacatgtttcagctgtaactttaacccctcgagatttcccccaacttatggcttcaacagtccgctttgctgaaacatgtgctatatgcacaggaacattgaggtattctgctaacaaaatacttctaatagcctgtaatgtttcagcaatatctggctgtccacttagcccgagcttaccactaatgaaaccttcattcatatgtgtatcacaagctaaataannnnnnnnnnnnnnnnnnnnnnnnnnnnnnnnnnnnnnnnnnnnnnnnnnnnnnnnnnnnnnnnnnnnnnnnnnnnnnnnnnnnnnnnnnnnnnnnnnnnnnnnnnnnnnnnnnnnnnnnnnnnnnnnnnnnnnnnnnnnnnnnnnnnnnnnnnnnnnnnnnnnnnnnnnnnnnnnnnnnnnnnnnnnnnnnnnnnnnnnnnnnnnnnnnnnnnnnnnnnnnnnnnnnnnnnnnnnnnnnnnnnnnnnnnnnnnnnnnnnnnnnnnnnnnnnnnnnnnnnnnnnnnnnnnnnnnnnnnnnnnnnnnnnnnnnnnnnnncctgacggtttgttgctccggatacgtacaaaaactggacaggtcgagagctgtggcaaagtttaccc

SEQ ID NO: 8 - DNA, 799 bp, Lawsonia intracellularis
  misc_feature (1)...(799): n = A,T,C or G
nnnnnnnnnnnnnnnnnnnnnnnnnnnttcaaattataccattaagaggtaacattgatactagactacggaaacttatggcagaagagtttgatgcaattattatggcaactgcaggaataaaacgtttaggccttatagcaccatatatgtcctcattgccttgtagtgttatgcttcctgctgttggtcagggagcccttgggatagaagttcaaaaagaaagacaagatgtattggagctattttcttttttaaatcataaagagacatatcattgtattcaagctgagagagactttttagcaggccttgatggtggatgtcaggttcctattgcaggttatgctactatttgtaaacaagaaactatctgcttagaaggtttagttgctaagagtgatggttctgttatnnnnnnnnnnnnnnnnnnnnnnnnnnnnnnnnnnnnnnnnnnnnnnnnnnnnnnnnnnnnnnnnnnnnnnnnnnnnnnnnnnnnnnnnnnnnnnnnnnnnnnnnnnnnnnnnnnnnnnnnnnnnnnnnnnnnnnnnnnnnnnnnnnnnnnnnnnnnnnnnnnnnnnnnnnnnnnnnnnnnnnnnnnnnnnnnnnnnnnnnnnnnnnnnnnnnnnnnnnnnnnnnnnnnnnnnnnnnnnnnnnnnnnnnnnnnnnnnnnnnnnnnnnnnnnnnnnnnnnnnnnnnnnnnnnnnnnnnnnnnnnnnnnnnnnnnnnnnnnnnnnnnnnnnnnnnnnnnnnnnnnnnnnnnnnnnnnnnnnnnnnnnnnnnnnnnnnnnnnnnnntn

SEQ ID NO: 9 - DNA, 852 bp, Lawsonia intracellularis
  misc_feature (1)...(852): n = A,T,C or G
ttccatgtccgcccatagccgttcaatacgcgtaatcnnnnnnnnnnnnnnnnnnnnnnnnnnnnnnnnnnnnnnttgaattagtaaaacaacgtacaatgaacaatcctgtttattatgtacaatatgcttatgctcgtatctgttctattataagaaaagctcatgaccttggctttactattactgatgtaaatgaagttcccttatcaaatattactacaaaagatgaactcaacttattacgcctattagataagtttgaagatgtcatttataatgctgcacaacaccttgcccctcactatattacacattatcttatggaacttgcaggagaacttcatagttattatgcaaaatatcctgtattacaatctaatgaaaagactatagttctttctcgtcttgcattactacaagctgttggacaagttatttataatgcgcttaatattttcggtgtaacagctcctaaaaatatgtaactacctatgtcatataaaccaatatccaaaaaaatagtatgaccaaaaaagtatagttctcacaccacacctacttggttttttttttcgatagcatttcaaggatatgcgtaacaccttttataaggattatggctattaagctggagcttctgttttggaatactcataggaagagggtgcagctctaaccataatcttttgaaaataataactcataactgaccatctttggaaccaatggaatacgcctatttaaagcaaaaaatacgtttatgctgaatccaacagaaataacccctcctttataaaaaaaaaaatcatatttttcagaatagaacactttaatgacaatcctttcccg

SEQ ID NO: 10 - DNA, 847 bp, Lawsonia intracellularis
ccatgagaggttgcggtctgtatagtgcaaaagtcatattgggtaatatatctctgttcccgtggatccacagctgctcttgctatgttaaatgatgctataaaaaaaggtggtgcttttgcctcttcacaacttggaggattatcttctgcctttattcctgtttcagaagatgctagctttgctgctgcagtccaatcaaatatattatccctagaaaaactggaagctatgacatgtgtctgttctgtaggacttgatatgattgccatccctggagatacacctgcatcaactatttcaggaattattgctgttgaaatggctattggagtaatcaataaaaaaacaacagctgttcgtataattcctgtcccagggaaaaaagttggcgaaaaagctttttttggcggattactttggcgaggctactattactcctggccctaaaggtaatgcaacaacctttattaaaacatggaggatgtataccagcacccctctctagcttgagaaactaatattatacctaaatttctttatcaacaaagttttttaactaataccctaatcagtttaaaaatatcctatttattccaattattatcgttcactttttgtcctttttagaaccaattattcatccacaaaccacattgagtgcattaaatttcaacaatctttttaaaacactgtatgtacaaaatggtcttactagaaagattcctctttttctaaataaataatttgtcactaattgtctaagcgaagaaaaattatttctactttgctaatgattcatacttaaataaagtcttagctacgaacaaattttttatctaatacc

SEQ ID NO: 11 - DNA, 754 bp, Lawsonia intracellularis
  misc_feature (1)...(754): n = A,T,C or G
agctcggtacccggggatcagcaggatgttatggctgtacgccaaacaggcttctcactcctttgttcaagttctgtacaagagtgtatggatctggctttagtagcacacttatctgctattgagtcacgtgttccattttgccatttttttgacggatttagaacatctcatgaagtccaaaaaattaatgttattgaatatgaagagatccaaaaaattgtaaattgggaaaaaatacacatattccgtaaaaacgcaatgaatcctgaacatccatatcaacgtggaacagcccaaaaccctgacatctactttcaaaatagggaacgttctaaccccttttataatgctgttcctgggattgttattgattctatgcaaaaagtattttccatcacaggaagacagtaccaactctttgattatgttggtcatccagaagctgacagaatcatcattgctatnnnnnnnnnnnnnnnnnnnnnnnnnnnnnnnnnnnnnnnnnnnnnnnnnnnnnnnnnnnnnnnnnnnnnnnnnnnnnnnnnnnnnnnnnnnnnnnnnnnnnnnnnnnnnnnnnnnnnnnnnnnnnnnnnnnnnnnnnnnnnnnnnnnnnnnnnnnnnnnnnnnnacaattgccacctgaatgcaatgcgcctgtgcgatttctcctaccattggcgtattacacgntatgtgactttaatcaactgtttttgcgatattaacagccgaaaccgcacaccgtgcgcgc

SEQ ID NO: 12 - DNA, 752 bp, Lawsonia intracellularis
gcagttggtgagatagggttagatttttatcataaagattgtactgctactctccaagaagaagtttttagagctcagcttaactttgcaagagagatgagaaaacccatagtaatacattcacgtgatgctgcaagggatacgattaggattcttgagtctgaaggatgtatagcttaccctgtactttggcattgctttagtggtgatgcagtatcttttctagatagaattttaagtaatggttggaatatttctgttgcagggcctgttacatatcctgggaacaaagaactacaagaagtaatccctatgattccagaagacaagttattaattgaaacagattgtccatacctttctccagttccatggagaggaaagtgcaatgaaccagctttggttgtttttactgcagcatatatagcttctttaaagaagatagatattatagaactttggacacaatgcggagaaaatactaaaaaattttttatgtttcataacttaagcggatcattactctattgttacttatacaggtttatttattccactgaaaaaagaagttgtcctcccgagaaaccataataaaatatggccccctctccagaagccgaatacctgcccttatagattaacttgaaccggtggctaatgattaaccaaatccttgtgtctcgggatttccaacttgtagaactgttttttaaattggaaaagacacttaaggaaccgggcatgagttgccg

SEQ ID NO: 13 - DNA, 794 bp, Lawsonia intracellularis
  misc_feature (1)...(794): n = A,T,C or G
ctcggtacccggggatctgttgttgctttgtcgctccctgaaacaactttaacaatattttctaatgtatggatggtatcgccaggattaatacgttcaggagaataaccaactgtaaaatcagtaagatatgataagccagaaacttcttctaaaagtggaatacatatttcttctgttgcaccaggatataccgttgactcgtatacaactacacatccttgacgcatatgtcgtgcaaccatttgagtagctttgataagaggtgtaaagtcagggttacggtatgtatctataggggtaggaacagctataataatgatatctgcttgatggatatctgtttgattataagaaaaggatgcttttgtattatctaatacttcacttgaaatttcacctgttcggtcatattttctaagtaattcatgtattctacgtttagatatgtcaaatccaatagctgggaaatgatgagctagctgcattaaaagaggtaatcctacatatccaagacctactaccataacacagatatctttggtatataactgctctatggntacccattgtatttctacaaccagctttttgtacaatcatagtttgaactctttttgagggncttttttcatacttttaactcccnnnnnnnnnnnnnnnnnnnnnnnnnnnnnnnnnnnnnnnnnnnnnnnnnnnnnncgtcggactggaaaaccctgcggtacccacttattgcttgagaaaatcccttcgcaagtgggattacgatagccggaccgtcgccttccaat

SEQ ID NO: 14 - DNA, 762 bp, Lawsonia intracellularis
ggtacccggggatcatatagttattaaaaaattataacttaatgaaaatataattatcactgaataataattatgaaatgttatatatcaacacatcaataaaaatatatcaattatatttaataaattttattattaaatataattatacctatactatattatattactattacaaaatacaatactaatatcgcagctttaactttctgcacttccaaggtgggatagctctttttttactccaaagtccaaacttgttctttctagaaaattcttctagttcataccagtagttacacataacatcgctacaatatttaggatatacccaagcaagacctttccgaagtaaatgttcttgtagtgttaaaccatcctctaaatatataatagctaacgtacgaccataaatatcataacccatatttttgactacaatattaccatgctcaaccaaaaattctgtagctcttttagctaataaaccaaagggttgagatagctcaggagaatcaatgccatatagacgcaatatttttttattacctggtttatataaacttaagctttttccatctattacttttataaaactttctggtcttgccatccttaaataaggaggaagggtttagaggctaaaatgttaggcaaataatcgaatgttccctaagataataatggaaaggtgatttaccaaatgggtaaagttaggaccttcgtaaaaatgggttttaaacaaactgttaattggggatg

SEQ ID NO: 15 - DNA, 881 bp, Lawsonia intracellularis
  misc_feature (1)...(881): n = A,T,C or G
ttagtagtagggagctaacgcatgaaatatttaaaaatctatttttcagaaagcattgcgatttcgtgctcgttacccggggatcaaaatgtaccagacctgtctcctgaacagacagttattatcactactggttcacaaggagaacccctttcagccttagtgagaattatttcaggggaacatcgctatctctctatccatgaaggtgatactgttattatgtcttcaagagttctacctaatagtactttagcagtaaatcgccttataaatagaatataccgattaggagcaactgtttgtcttaatggacaaaaagcaattcatgtttcaggacatgcacgtcaggatgaattaaaaattttgctcacagtagttaatcctcaatattttgttcctatccacggagaatatagacaactatttcgacacaaagaacttgcaatgcaacatggaattccttctgaaaacatttttatccttgatgattggtgagccccttacacttcttacaaccaaggtccgttaagaaaaaaaaatacccttaaaatctattttgattgacggaaaatgtactgtcgatgttgatagtagtgttcttatggaccgacatcttttggaggatacgtggtaactgttgttttctctactaagattatgtacccgtaccctctatatatgaaccgtatgtatccaatcttngattggccgtattttaacaatctgtactgggtatcccttgcgttacccaccttattgcttggcgaatataccctcttcgccggtgggtaaattaaaaattcccctcataagcttctcacttagctcacacaaaatgaagtgcctggacgtattattctaacgatttgaagtttacg

SEQ ID NO: 16 - DNA, 809 bp, Lawsonia intracellularis
  misc_feature (1)...(809): n = A,T,C or G
nnnnnnnnnnnnnnnnnnnnnnnnnnnnnnnnnnnnaagagatagtgcgttctggctttaaaaatatgataggagcaggcgtagttcttacaggtggaacagcccttattcaaggctgtcaagagttaggagaacaaatttttaacttgccaactcgtataggatatccaagaaatgttggtgggctgaaagatatggtaaatagccctaaatttgctactgctatgggattacttcattttggtgcagaaaaagaagggatggagcaaagatttcgtattcgtactgagcacacaatatttaactcaatattatcacgtatgcgaaagtggtttgctgaaatttcgtaaaatagtaactatcttttaacaactatcccctgttaaaagtggagggatataatggaaatgctttttgatacaatggttcctcaagctaaaataaaagttattggtgttgggggtggcggaggtaatgctgtacagaatatgatagaatcctctttaaggggtgttacttttatttgtgcaaatacagatgctcaagcacttgctcgttcaaaagcagatatcaaacttcaaataggagagaagcttactaaaggccttggtgctggtgctgagcctgcagtaggaccagatgcaccatttgaaagttttgcgtttttaaggaactattggtgagatcgaattgtttttgacaacaagaagtgagggggactgttcacgtgaccctcctattgggtcaacggttaaaaaaggaaccctactgtggggttgtacaacacttggttttgggggcacaattcg

SEQ ID NO: 17 - DNA, 844 bp, Lawsonia intracellularis
  misc_feature (1)...(844): n = A,T,C or G
gtcacagtttctacttcaataatcttactgaatctacaagnnnnnnnnnnnnnnnnnnnnnnnnnntttgaatgctctaagaagcttttcatagaattcttgctctgctaaccctaatacatttcgaacaacattttcagttaatatgccattactaaacattaatgtttgtccaagtaatgacatactatcacgtatactcccagatgctcttcgagctattaactgaatagcattatcttcataacaaatattttcctgtttaagtacatgaataaggttataaataagctcttctttagtaagtggttttaaaacaaaatgttgacatcggcttataatagttacagggaatttatgaagttctgtcgtagcaaaaacaaaagtagaaaaaggaggtggttcttctaatgtctctaataatgcattaaatgactctcgtgtaagcatatgtgcttcatcaattataaaaactttatagcgcccttccattggagcataagcaattagattccggtaatcgacgagcataatctacacctcgattagaagctccttctatttccattacatctacatgtatacctttagtaataccgttacactgttcacaagtattacaaggtttatcttgtggcgcctgttgacaatattaagcttttgcaaaaatttaacaaagttgtttctcctacccccttgtaccctctaaaatacccagaaaactttctttcagagaagacgagtaaaatattttacaaattttgcccacaactccttaagaattgcctttttatattcaagtaccccgttttataaaaattctcaccaaaatctaaggtaaaaa

SEQ ID NO: 18 - DNA, 776 bp, Lawsonia intracellularis
  misc_feature (1)...(776): n = A,T,C or G
nnnnnnnnnnnnnnnnnnnnnnnnnnnacattcaaaaatatagaaatttcttctttacccaatggtaagccacagctacattttcaaggcaatgcaaaaaaaaaagctatctcccttggtgttaacaatataatgattacattaacacatagtcataatacagctggtgcggtggttatattagaaacataaaaaatacaacttaaaaaggaaacaagatggaaattcgtggaacaactattcttgctgtaagacataaaggtcatgttgcattagctggagatggacaagtcacattaggtcaatcagttgttatgaaacatacagcaaaaaaagttcgtagaatgtataaaaatcaagtaatagctggatttgcaggtacaacagctgatgctttcactttatttgaacgttttgataactatttggaagaaacaaatggtaatcttgttagagcggctgtagagcttgctaaagaatggcgtaaagataaatacttacgtcgccttgaggcaatgttacttgttgtagataaagatcatacatttgtactaagtggaactggnngatgtattgagccagacgatgggattgcagctattggaagtggggattgtatgctgtggctgnagcaaggctttagtcgctcatatgagtaagtgcttgagaattgctcgtgaaacatgcctttactgaagaatatgtgtttacaacttaatctacctagaacttttgtgttaacagttaccaatatgtattactatcactatatatat

SEQ ID NO: 19 - DNA, 860 bp, Lawsonia intracellularis
  misc_feature (1)...(860): n = A,T,C or G
tttatgagaggacacaaaatccttttttcttaaatttataatannnnnnnnnnnnnnnnnnnnnnnnnnnnnnnnnntctctcctcggactttaagtgactatgctaataatatattaatattaagtgctgtcccctcattagatacaggagtatgtgatatagaaacacaacgttttaatagtgaggcagcaaaacttggtgaaaaagttcgtatcttaactattagttgtgatttaccttttgcacaagcacgttggtgtggagctactggtgtgagtgcagtagaaacactttctgaccatagagaactttcctttggttatgcatatggtatagctattaaagagttgcgcttgttagcacgggctgtctttgttgttgatacaaacgggatgattacctatcaagaaattgttcctgagatgacacacgagcctaactatactgctatctttgaagcagttaatactgcgagttaactaactagtctattaattaacataattattgcccaagtttcaggatatctttaaactgggcattgcctatatttataaaaggaatttggtagaaaacatataacttataagtcagattttttattataagcaatgattatatagcagttagttaatggagtaattcataaatggttttcatggattacaaataaatttaggattattttattacctatgacgatatctatacctctagtattaaatccgtaagctattggaagatcgttatgtggtcacaaatacctctaatctactgaagattgtacttgtactgtcgcgtttaaactcttacaggaaacctgggttccaattatagttgtaaacaccctttgcgtgg

SEQ ID NO: 20 - DNA, 797 bp, Lawsonia intracellularis
  misc_feature (1)...(797): n = A,T,C or G
nnnnnnnnnnnnnnnnnnnnnnnnnnnnnnnnnnnntccttttggtgctggtagttgttgaacaatagcctcaagaacactatctactcctaaccctgtttttgcgcttatagagatagcggtcgagcaatcaagtccaatagtttcttcaatttcagctttaactttttctatatcagcactaggaagatcaattttattaaggataggaataacctcatggttatgttctagagctaagtatacattggcaagagtttgggcttctactccttgagtagtatctataacaagtagtgatccttcacaggctgataaagaacgagagacttcgtaattaaaatctacatgaccaggtgtatcaataaggtttaatatgtaagtttttccatcagcagttatatatggaattcgcactgtttgtgctttaattgtaatacctctttccctttctaactccattttatctagatattggtcacgtttttctctatccgaaacaaggttagtatattcaaggatcttcgagcaagatattctgatgcagccattgaaagtgtngctgaaacccctgtaataaacccagccatactgattactttattatcggggagtgcaaatgtaaatccagctaaagctccttgtagctcaactaagctcatttagtcaagaaccatgaactattaggttaaccttagactaataggacaganattgngatcatgctctttcattgccataattttaacctagaattcgtcctatccttgattcccaatgagcaattttttgattaa

SEQ ID NO: 21 - DNA, 772 bp, Lawsonia intracellularis
  misc_feature (1)...(772): n = A,T,C or G
ctcggtacccggggatcatgataatagatatattacttataatagtgaagcaatattgttagctatagagtatatttataaaggtaagattattgctatgaaagggattggtggttttcatcttatttgtgatgctactaatgctgacgtagttaatacattacgctatcggaaaaatcgcccagataaaccattagctgttatggttccaaatataaatattgctcgacaaattgcttatattagtgaagtagaaatccaaaaaatgcaatcaccagagtgtcctatagttattttgaaagcaattcctcatagtttaccaaaaaatattgctccagatgtttctactataggtcttatgcttccttatactccactgcatcacattttatgtaatacattaacaaaagttgctgagctagaaagaataattcctgctcttgttatgacctccgctaatgtaagtggtggtactataatatataataatgacgatgcactgatacgacttaatactattacagatttttttttatttcataatagaaatattattgtgccagttgatgactctgttgtttgttaagagaggacaacataggacaatcacctaatggcattttattagacgtgcaagaagatatgcaccactacctattacaggtaaaacttttaaggataatacttccttgcatatagcataggtgcaaacataaaagacatttggttacaggngacaggattattttagtcacaatagagatcttaagtg

SEQ ID NO: 22 - DNA, 753 bp, Lawsonia intracellularis
  misc_feature (1)...(753): n = A,T,C or G
cccggggatctacaataagaatgactatcatataaagaaataaataccttaacaactataggtaaagggctatagttgtatctctatttaaatagctctatataaccattctattttgataattatacgattattatacgtataggataccttttaaaaaagactgcatagaatattctatagttagagtgtatcttattttttctatatcttactttactttgatgctactggtgtagacaataaaaatttaccctgaattatacgtaacaatgtcccaagaatcaaaagtgcaatgacaccattagaaaaaataaaaattggtattgccatttgcccaacgacactttcaggattctctataaaaaaatgcaaagatgaaacagaaagagctgaaacaccaaatgaaaacgcccaaaaagatacagaaaaaggttgttcaaaagtccacaataatagccatagtaaaaannnnnnnnnnnnnnnnnnnnnnnnnnnnnnnnnnnnnnnnnnnnnnnnnnnnnnnnnnnnnnnnnnnnnnnnnnnnnnnnnnnnnnnnnnnnnnnnnnnnnnnnnnnnnnnnnnnnnnnnnnnnnnnnnnnnnnnnnnnnnnnnnnnnntttcaacagtgccaacctgatgcgatgtgcctgatgcgatttctcttaccattgtgcggtttccaccgattgtgactctatcaattgcttgtgccatagtaacggccgaaccgaacaccgtgacgcctgtgtt

SEQ ID NO: 23 - DNA, 762 bp, Lawsonia intracellularis
  misc_feature (1)...(762): n = A,T,C or G
nnnnnnnnnnnnnnnnnnnnnnnnnnnaagatatcctgaagtacagagagcatgggtaccctgagatatttgatatccgtttggtaggtcaggataaaagtagttttttcgagaaaaaaaagagtgagtattaattgtacaatgcaatgcaagtccagctttaactgcgtattcaacagctagtttatttagggatggtaatgcaccaggcatacctgcgcagatttcacatatattagtatttggtggagttccaaatgttgtagggcaagagcagaagagtttagactttgttccaagctgaacatgtacttctagcccaatgacggcttcaaagtgactcatgtatagatttctcccttattaggatgttagtgaatacagttgtgggttaagagaaggattgttatacatcttatattggaaataaagtttaggttttcggattccttggtggaattcgtttactaggtttaggatagcattattaannnnnnnnnnnnnnnnnnnnnnnnnnnnnnnnnnnnnnnnnnnnnnnnnnnnnnnnnnnnnnnnnnnnnnnnnnnnnnnnnnnnnnnnnnnnnnnnnnnnnnnnnnnnnnnnnnnnnnnnnnnnnnnnnnnnnnnnnnnnnnnnnnnnnnnnnnnnnnnnnnnnnnnnnnnnnnnnnnnnnnnnnnnnnnnnnnnnnnnnnctaccattggccgatttaaccgaatgtgactttatacactgttgagcgatagtaacagccccccgcacct

SEQ ID NO: 24 - DNA, 727 bp, Lawsonia intracellularis
gtacaggttatatgagttgaaggggcaataccttcttcaaggaataatcctatcataagaagtttccatattgaagcaggaggatatgtactttgaatagtcctattttgtagtggatgacgtggattatctcttaggatttcccaatttttttgagaaagtccacgtacaaaaagattgttgtcatatgctggagtcgtaacaagtgcttggagtcttcctgtgtgaggttctataacaatgacacaagcagcatgtgtatctagtaatgagacaattttttgttgaagttgtgcatcaaggctaagctgaatatcctcaccatgctggggtgctttaactaatacttttcctaaagctcttcctagtacatccacttcaacactatattcacctttttctcctcttaaacgtggttcaaggatatactcaagaccttgttttcctatagtatctcctaatgagagtactttatccatagcaagttctttttcattagcttcagcaacataaccaagtatatgtgcaaattcatggctttgagggtaatagcgtttggagtgagctacagttataagccctggccaatgcataagctgagaatctatttttgcaacttgttcacaaggaatatctgtaacaacaggattggtccaatggttaacttttttttaatctgattaaatttgctattagtggctcaggggggatccatccaaccttactg

SEQ ID NO: 25 - DNA, 752 bp, Lawsonia intracellularis
  misc_feature (1)...(752): n = A,T,C or G
gtctataactgaacaatggaactattggcacaaacacttttctatttccaatcaatatatacgttttatagcctacctacaatctttttccaatacctacggaccattaagtaaattttcttctatcttagctcaaattaagggtttacaggatgttgcaggtatttctgtaggtactagacctgattgtttaacaaataaaaaattatctttaattgtagaaatgccttatttagaaaaatgggtagaatttggtgttcaaagtcttcatgatgaaacacttataaagattaaacgtggacattcttctaaatgctcagaacaagctattattcaagctgcaaatgcaggccttcaagtttgtgcacatgttatgtttggtcttcctggagaaacccctacccatatgttgcaaacaatagatagactaaatagtttacctattcatggaatcaaattccataattgttatgtttgtaaaaatactatacctgaaaaaagagttcaatgcaggtaactattatccattaactgaagcagactattctnnnnnnnnnnnnnnnnnnnnnnnnnnnnnnnnnnnnnnnnnnnnnnnnnnnnnnnnnnnnnnnnnnnnnnnnnnnnnnnnnnnnnnnnnnnnnnnnnnnnnnnnnnnnnnnnntttgccagtggggattaacaaaaagacccaccgttcgcccttcaactatgtccccccaatggaattggcctgtaggggtttttcctaaccn

SEQ ID NO: 26 - DNA, 711 bp, Lawsonia intracellularis
gttgattcttgatgaagctacaagttctcttgattcagagtctgaaaggatggtccaaggtgcattggaaaatcttatgagaaatagaacaagtttaattatagcacatcggctttctactattttagaatctgaccgtattattgtatttgaagatggaaaaattgtatcttctggaaaacataaagagttgttaggaagttgtgagttatatactcgtttatatatgatgcaatttagaactggtgagtttcaggatgcgcctatcgaaaaaggttgttaaaccactatgtaaaatattagagtggcctctttatggattatattgtctatggtgtgggacacttcaatataatgcgattaataggcaaagcgttgactctagaacagatgctggacttccggttatattatgtttatggcatgatgagttattccctctcatttattttagggggaaattaaaaatcattactgttgtgagtaaaagtaaggatggagatatactagctaatgttattcaacggataggggtagaaacagcttgtggttctagttctgaggtgtctcaaaacattgcgttatgtaattaaccgatgaggatgggtttgggcttgaataatgagaaggccctaaagacccggtataagttaaaaggtgaattttttgacacaacaataccctatgtcctatcaaattatgaaagctaaa

SEQ ID NO: 27 - DNA, 872 bp, Lawsonia intracellularis
  misc_feature (1)...(872): n = A,T,C or G
cgctacgttaatcacatctatatacgtttgttcgaatactagctcggtacccgggttcgagatcaccgccggactggccgacaaatacattcctgatgccgagcgggcggtgccgtgacatcgccgcataaggtcgcctttccggcgcgttgtgcggtcaacatttcttacgagaagcacctgtgttcccaagtctttccggccggaattccggtggagggattcttcgagggaatggtcgagctcttcgacgccgacctgaagcgcaaaggtttcgacggcattgctttgccggccggcagctacgaactgcacaagatcaatggggttcggctcgatatcaataagagcctggacgagctgggcgtccaggacggcgannnnnnnnnnnnnnnnnnnnnnnnnnnnnnnnnnnnnnnnnnnnnnnnnnnnnnnnnnnnnnnnnnnnnnnnnnnnnnnnnnnnnnnnnnnnnnnnnnnnnnnnnnnnnnnnnnnnnnnnnnnnnnnnnnnnnnnnnnnnnnnnnnnnnnnnnnnnnnnnnnnnnnnnnnnnnnnnnnnnnnnnnnnnnnnnnnnnnnnnnnnnnnnnnnnnnnnnnnnnnnnnnnnnnnnnnnnnnnnnnnnnnnnnnnnnnnnnnnnnnnnnnnnnnnnnnnnnnnnnnnnnnnnnnnnnnnnnnnnnnnnnnnnnnnnnnnnnnnnnnnnnnccttgacagccttgttggctcccggattcccttacagaaaacttgggaccgctacggaagctgtagtgttaaagtttttacgtattacccaacccgcggacaaaggcccgggaccccatttttaggtaaggcagaaaaatggtcttaacagcgaggcctttgggaac

SEQ ID NO: 28 - DNA, 742 bp, Lawsonia intracellularis
  misc_feature (1)...(742): n = A,T,C or G
gttagcagcacaattatgtgctatagttatatgaaaaataaaagcaatacagtgtgtgaataatagaagacgaatgtatttcatcttaaaagtattttatctcataggattaactacgtttaagttggactgcagtttgaagcatgttgtctgaagtttggattgcttttgaattcatttcatatgctctttgtcctacaatcatttgtaccatttcatcaacaacctctacattagacatttcaaggaatccttgagctatagtccctaagttttcttcaccagggacaccttctaccgcttcaccggatgcttctgtgggaatatagagattacgtccttttgcatccagtcccgctggattaacaaagctatataaaggtatttctccagcagcgatttcttgtccatttgcgtctaaagcagtaatacgacctctttcagaaatagcaacagatttagcatcaggaggaactgtaaattctggttgtagggggtatccattggctgttacaagagtcccatcctgattaagtttaaaagcacctgctcttgtatacattaattgatcaccaaccaatacttgtgaaaaccctttgccttcaatagccatatttagaggattacctgtgttctgtgagtcccctgggtaaaaaattatggacggttgtaggcgacttccattcaacctgaatnctacaggaatccttttttccactgtagctaacctgcatctatattn

SEQ ID NO: 29 - DNA, 780 bp, Lawsonia intracellularis
  misc_feature (1)...(780): n = A,T,C or G
actaggtatattccttttatgtcagaaagtccaatcatgacagagccaaaagaaatgtggcattgtcaaataacaaactgtggatatatctataatcctgaaagaggagataaaagagctaaaattccaccaggaacggaatttgaatcgctacctgataattggcattgtcctgtttgtggtgcttctaaaaaaagttttaagccactaacagatagttaacttacttataagtcaaggagagaaatttctctccttgacttatttttttaagaaatgcattcaatttttctagctaactaactaaaactttttttaataatttatgaaaaatattgctgtatggaatactgcttttcttggagacacagtacttactcttcctcttatccaaactcttgcaaaaacttacccagaagcctctattgatttctatgttcgtaaaggtaatggctctcttttctcttcacatccaaatattaaaaatattattgaatataataaaaaacaacaattcataaaaagtacaataaaacttatccaacatattataaaacaaaactattatcctctatagtcgaccctgcagcatgcaaccttggcactnnnnnnnnnnnnnnnnnnnnnnnnnnnnnnnnnnnnnnnnnnnnnnnnnnntgcttgaagaattccccttttcagttngtatatcaaaagccgaccctacgctttccaatatgccaacttattggaagggcctgtgcggtttttctttccattgtcggattacccatagtgcac

SEQ ID NO: 30 - DNA, 789 bp, Lawsonia intracellularis
gctcggtacccggggatcctaagtattctgatcaaatggttcgtggtgctgttactttaccctatgggttaggaaagacagtacgagtagctgttttttgtaaaggtgaaaaagaagctgaagcaaaagaagctggtgctgactatgctggtgcagaagaacttgtagcaaaaattaaagatggctggcttgattttgatgcagctgttgcaacccctgatgttatggctcttgtaggacaagttggacgtcaacttggacctcgtggccttatgcctaatgcaaaaacaggaactgtaactttcaacgttactaatgccattaaagaacttaaagcagggcgtattgatttcaaagttgataaagcaggtgttttgcatgcaccactaggtaaagtttcatttggttcagaaaaaattcttggtaatctaaagtctcttgtagaaacagtgaatcgtcttaagccatcctcagcaaaaggcacttatataaaaagtatggctatatctacaacaatgggaccaggatttaaaatagataccactctttgtaaaaaatttcttgaaagttaacctttattgaaaaagaccatcttacaactaaaatggttggctaaggactggaattcgagtcgagacaacaagtgaaacttccttaataactgttagaaaacaccttggttgtattccaccatagaacccatactggaggaaatacgtgaataatcttaagatactgaggatgaacttgactgccgtttttaacgtggactggaaacctggtcccatg

SEQ ID NO: 31 - DNA, 795 bp, Lawsonia intracellularis
  misc_feature (1)...(795): n = A,T,C or G
cggtacccggggatcctcttaaaacaaatgtagttttcaattctaaatggctaatgtctatgtcatcagtagactttattcgtctagcttcacattatacacttgcacgcatgttagaacgagatgatttttctaacagatataaagaaaatacaccaatagctcttcatgaattactatacccactcatgcaagggtatgattctgtggctctaaaaagtgatatagagcttggaggtacagatcaaaagtttaacttattagttggtcgtacacttatgtcacactataatattgaacctcaatgtattcttacaatgccactattagaagggcttgatggagtccgtaagatgtcaaaatcttatggtaactatgttggaattgacgaacaaccttatgttcaatttagtaaagttatgtctatctctgatgaacttatgtggcgatattatgaacttatctctactagtagtctatctgaagtagaaaaattaaaacaaaatgttaaagaaggacatctncatnctaagaagtaaaagaacagttagctgttgacattgtaacacaataccatggcaaagaataagcttatgaaggcactgcagaatttacagctngttttgttaatggtgctccttctgatgatacgcctgaaattatatgtaactatggtgaaacaagtaagccacctgcttttctactgactctaagtatgtacttctcgagtgaagcaaacgcctataaacaggntctcttacgtgatgataacgtatatgagtgagtaccctgacc

SEQ ID NO: 32 - DNA, 754 bp, Lawsonia intracellularis
tcgacgatctgaagttggaaagtcaactcttatgggaatgatggctcggtacacttctgcagatgttaatgtaatagggttgataggagaacgtggtcgagaagttgttgagtttatggaaaaagagcttggtccagaaggaatgacacgatctgttcttattatagctacatctgatcaatctcctcttgtacgtatgcgtgccgcttatgctgcaacagcagtagcagaatattttcgagatcaagggaaagatgttctgcttatgatggattcagtaacccgatttgctatggcagcgcgtgaaattggacttgctgttgatgaacctcctactacaaaaggatatacacccacagtttttgcacaactacctaaacttcttgaaagaacaggtcgtagtaatactggtacaatcacaggaatatatactgtttctgttgatggagatgattttaaagaacctattgctgaagcttgtcgctctttacttgatgggacatattgttctacactttatcctggcgatcaagatcattttcaactattgatgtattacgcttttattaccgtttacatactatttttgcatccagacaagttcaaaatggcttttgtgggagaatatggaacaattctctactcgtaattattatttggactaatttcagggttctttagaattataatgctacaatgcagtgctataataataataacaaattgtgagatacataataaatcttcgctaacc

SEQ ID NO: 33 - DNA, 737 bp, Lawsonia intracellularis
ggtacccggggatcaatcatcgctgttatttgagaaagtagcagccactgatggtgcagccagtgtctttgccgtagatttacttgaggtaatgaaaatacagttacagtcataattggtgagtatagatgcttttaacagacagatatatagttaaagcaacggatagcaatgtatatccattaaaaaagtgggacaatatcttactgttatttattattttttttagcattatttttatatcagggtgtaagttagaagtttataaggggcttacggaagatcaggtaaatgaaatggttgctacattaatctatagggggattgatgtagaaaaatctccaggtggtaaagaaggattttctttacttgtggcagaagaacagttgataagtgctttagagattttaaaaaagaatgcattacctagagaaaactatgttagccttggggaagtcttttcaggccaaggtatgataagttctcaatctgaagaacgtgcacggatggcctatgctatatctcaagagcttgcaaatactttttctcgtattgatggagtattaacaacaagagttcatgtggtcccaggctatacagatcaggctgtggatctaagatccttcatttatggtatttttataagcatacgcctgatcgcctggagtaaaatcctcctagattcgtgagtggggctaaaagcttctgatctttaaagcgactgaggatgcagctgg

SEQ ID NO: 34 - DNA, 745 bp, Lawsonia intracellularis
cccggggatctcgtactctagatgctcctacaccaacaaacatctcaacaaaatcagaaccagaaatggaaaaaaaaggaacccctgcttcaccagctacagctcgagcaagcaatgttttccctgtaccaggagggccaacaagaaggactcctttaggtatccgaccacctaatcgtgtaaattttcttggattagataaaaaatctacaacttcagagagttcttctttagcttcatccacacctgcaacatcttcaaatgtgactcttccttgttcctggtttagcattcttgcacgtgagcgaccaaaagacatagctcgcccagctcctccctgcatttggcgcatgaaaaaaacccatacacctattaaaagaagcatatgaaaccatgatacaagtagtgttatataccaaggagaatcttcaataggctcagcacgaacatctacatgttgctcaataagtttgcttaccaattgtggatccatggtttagtcttagtaatcctagatgtgctgccaaatacattccttagtggaagaatacatttaggtaaaaatgcttggtagatggccggtaggacttaagggtttgttgcctttaagaatagggagagtcgctcagcttgaattccaactattattataaagcttggtatgtgtgaaaacgcctttccggtggataaagttttggtttacataaataacataaagtcgttgtttcaactttaattaaagcaa

SEQ ID NO: 35 - DNA, 741 bp, Lawsonia intracellularis
  misc_feature (1)...(741): n = A,T,C or G
atgacttactagaaataaaaccttcaatacttaaaatataaccttttccccataagtttctttctgagatacttcctgaaacaccaaatttagaatgtgttgagtaaccaacaccacctgtgattgcacctgttcgagcttcttgaacttttacaagtagatcaacttcatcatctttccctgtaggcagtgtatctgtatctacttggttaaaatagccaaggcggttaaggcattcattagagcgtcggagatgttgaccattaaaaagatctccatcagcaaggcgtaattcacggaggataacattatctctagtacgagtatttccttcaacaattattctacgaagaaagactttttgttttttatcaataaggaaagtaacatcaattgttgcatcttcttcatttttggttgtttcaagatctacttcagcaaatgcataaccataatctgaataaaaatctgttaatgcttttacatcatcttgcataacagaaagagaaaaatactgctcatagtttttatnnnnnnnnnnnnnnnnnnnnnnnnnnnnnnnnnnnnnnnnnnnnnnnnnnnnacaacacgctgactgggaaaccctggggtacccaatttaatgcttgaagaaatccctttttcagttgctatatcgaagaagcccaacaatcgccttccaaaatggacacctgatgggaaaggcctgagcgtatttctttacacatgcgggttaaaacc

SEQ ID NO: 36 - DNA, 773 bp, Lawsonia intracellularis
  misc_feature (1)...(773): n = A,T,C or G
tctccggtgatcccctagattcaacatcacgtattcttgaaccaaactttgttggggaagaacactatacagttgctcgtggcgtacaaaaaatacttcaaaaatataaagaactccaggatattattgctatattaggtatggatgaattgtctgatgaagacaaactagttgtaagtcgtgcaagacgtattcagcgttttctgtcacaaccatttcatgttgcagaaactttcactggaacagcaggagaatatgtaaagcttgaagataccattaaaggttttaaaggtattcttgcaggagaatacgatcatctctctgaaagtgacttttatatggttggtaatattgattctgccgtagctaaatatgaaaaacgaaaagaatcaaaataggagttaacacatggagcaatcactccatcttgaaattatctccccagatcataccattgttagtgatcgagttacatatgttaacttacctggagttaatggtgaactaggtatctttaccaggacacatccctttaatggctgcattagacattggaaaacttcactatcaacaaagatcaaaaaattattatgtttttattttcgctggatttgctgaagcctctaatataaagtaacaggtcttactgaagctgccaaaaaaagcacgtgaattgatgtggcttgtgcccaagccagtaaagaacgtgctcaagattgtgttttaaagctgaanaaataattgtatggcccagccgaaatcttatgcatttg

SEQ ID NO: 37 - DNA, 803 bp, Lawsonia intracellularis
  misc_feature (1)...(803): n = A,T,C or G
gctcggtacccggagatctttatattggacgtacatagttatcccaaccaaggacaatcaatgattgttgcagagtcataccagatatttgaagagccattatctaatctttcagctacaataaccttacgtgcacttgataaatgaacagatggaacaaccaatacaagaccttctttccctccacgaccaagaccaagaggacgtcctccatcagctgtaaaactacggatagtcattaatgcccgctcaaaggattctgcattcaaaggttctgttgaacgaacagccatttgccaaaaaccgtatccagcattacaacgatagcgaacaccaaaaggaatgctatcggttgtaaaaacatgttcattttcaggatttgtaattacttggagttctgggagactacgctcttgaaataacaaaggacgcaatggacgagacacgtccaacataaaccaaggagcaacagggtcaacaacaacaacaacatttttaactccactaactgtaggtgataaactattagaaacaagtgtttcagcaccagaaccatcttcattntcatagatgacatgtgctgtatcaaaaaaantatgaccatcagaaacatttgttgatgtccttcagcaagaagttaaatacaagctcatcaggatgaacagctgctgcatatcccatttctaaaagagtggttatatacacangttcatcatctaaatagctgtagaaggatactactgtgctcataaagctattgcactgtgatcatgtcagaatatctgaagacctatctatcactt

SEQ ID NO: 38 - DNA, 811 bp, Lawsonia intracellularis
  misc_feature (1)...(811): n = A,T,C or G
ggctgtagtatcatctcnnnnnnnnnnnnnnnnnnnnnnnnnnnnnnnnnnnnnnnacctatttcaggagtaacaataagtttacgttttcctttggattcacctgcataagtaactatacctgcaatttcggaaacaacagccatatcttttggtttacggacttcaaacaattcagcaactcgaggaagcccgccaacaatatcacgtgtttttgaagtttcacgaggtttacgagctataatgtccccagcttgtacttcttgaccatctttgaccattataatagctcctgcagggagactatatattgcaggtgttgtacttgtgatacgttgttttgtttggccttctgcatcacatattgatattgaaggacggaagctagtagttctgtattcaattattgtcatggatgattgatgagtagcttcatcaagtttttcttggtatgttttcccatcaataagatcggtaaatttgataaatccatttacttcagagacaaaagggtcgttaaaannnnnnnnnnnnnnnnnnnnnnnnnnnnnnnnnnnnnnnnnnnnnnnnnnnnnnnnnnnnnnnnnnnnnnnnnnnnnnnnnnnnnnnnnnnnnnnnnnnnnnnnnnnnnnnnnnnnnnnnnnnnnnnnnnnnnnnnnnnnnnnnnnnnnnnnnnaacagtgtgcacccaattggaatggccctgtgcggtttttcctaccattgggggtttaaccggtaggggctttgatacatgtttttccttattaacagccgaccccaaaacctgtcccctaaggtttttcccaag

SEQ ID NO: 39 - DNA, 716 bp, Lawsonia intracellularis
  misc_feature (1)...(716): n = A,T,C or G
gttgggttttttgtagacttgattttgcatcgttaataagttgtgtgagatttttagctgtagagagcactgcttcacgagtagctgcatcttctggacgtaaggaaagattttgccatcctttaaaaaattctcctagtagtgaactaattcctgtacggtttgattcgttaaaaatgctttctatagagttcataatagcactttgttcgtcccatcgagtattttgggaaaaacgattaaggtaagcatcttctacaaatctattaaaattgcggtatatttcagctgtatggacaccctgcccaagcattcctggagtttgattaagtccatacctatcttcgaagcgtacactttggcgggaatatccttgtgtattaacatttgctatattattaccagtaacgtttagagctgtctggtttccagctattgcacttttcccaataccgaaaagtgtattgatcgacattacaatcttccagaaagaagggtgccctcaggacgtgaatggtgattataggttcctnnnnnnnnnnnnnnnnnnnnnnnnnnnnnnnnnnnnnnnnnnnnnnnnnnnnnnnnnnttgtgactgggaaacccttgcgttcccacttaattgttttgagaatatcctctttggcagctgctttatttcataaggccgaccgatgccttcccacatttgccagcttatgctatgccccgtgct

SEQ ID NO: 40 - DNA, 785 bp, Lawsonia intracellularis
  misc_feature (1)...(785): n = A,T,C or G
nnnnnnnnnnnnnnnnnnnnnnnnnnnnnnnnnnggcttcactccactcacgaggacgacgtaaaatacctttattttcaataatgttaagtccagtaggctgtccaaaccctaatttagtaagataatagtaaaacttttgtgaaccaagctctaaagaaatctttccacaaccaatattactagagtgacttaaaatttttgttacagaaagttctttttgtggtgtaccatcatcacgaatgacaacatttttaattttccaaactccaccttcacaattaaataatgtatcttttgtaacaataccttcttgaagagctgcagcaatcaaaaaaggtttaaatgttgacccaggttcaaatgcatctaaagctaaccgatttctatactcactaggtttatattgacgatatgcattaggattaaaaaaaggatattgtgaccaagctaatatctcgcttgatttaacatctacaataagaaccccaccccattttgccccaacctcgctgacagcctgtgctatagcatcttcagcaatagactgtttttgtaatttattgaaagctgtaactctctatactattgggaaattcttctccattattgatattaaaacctctttctgagcatttttattacagctggtttgtgaaaactcctgggatatttttaatgatgcttaggacttaaggcctttcataactcaaaaagcaagacttggcaacatgtatttgataactttaattttttaataatactccgaacttatggtaaagttg

SEQ ID NO: 41 - DNA, 805 bp, Lawsonia intracellularis
  misc_feature (1)...(805): n = A,T,C or G
tcttttaaaaatggagtgattctactcttctctttttataattatnnnnnnnnnnnnnnnnnnnncccgacgaaatctggcgctcggtgcgcgcgttgccggatttctggcggctgctgcaggtgcgggtggcgagtcagttcggggacgggttgttccaggcggcgctggccggggcgctgctgttcaacccggatcgggccgccgacccgcttgccatcgcgcgcgccttcacggtcctgttcctgccgtactcactgctggggccgttcgccggcgcgctgatggatcgctgggatcggcggctggtgctggtcggcgccaacgtgggccggctggtgctcatcgtcgcgatcggcacgatcctggcggtgcggtccggcgatctgccgttgctgctgggcgcgctgttcgccaacggtttggcccggttcgtctggtccggattgttggcgttctctgccgcacgtggtgccgctcgagcaagtgtgtgactatgaacgcggtggccaccgttgttcgggtcgtttgcccgttttttcgggcccaaatttatgtctgtagccgcgattcctgtttgtggcctgcggaccttttaattaacttctatgcatgcaagtttggcttgggccgttttttaacaactcttgattggtaaacctggtgttaacctaataatcgtctttgatacaatcccctttgccaatgggaaaaatgataagcctttcataccccttccacaatgccatcttattgtataggcccattcggtatttcctcccctggggggttttcaccatgtgcg

SEQ ID NO: 42 - DNA, 794 bp, Lawsonia intracellularis
  misc_feature (1)...(794): n = A,T,C or G
ctcggtacccggggatcaatactcagatgcaagtaagtatttttggaatgaagcttaccctgaaatcgatacaatcgagaacaacttacaaaaaattcaatctgcaggctataaagtcttaggacattttgttttacctaaaagtaattggaaagaaaattactatgctcctctccaaaaaaatcttgaaagaatgaagactacctataataatgatgaaaaagctcaacaagttatagcactaatacaatccgaaatcgatttatataaagaaaattcagatgattacagctatgtcttttatataatgaaaaagatataatgctttgtatttccaataaatatagcactgtttaatacatctaaaaaaatagaactacatcttctttatattctttatatgtaactaactttatactatattatattttttcttacttgacttatccattactctttggttaggtacttctatattagatgcctcagaacatctttatccttggcggttggccccttctgatagagaggcagcttttacacctttatatataagtaggttttccatgctaaggagatacaattatgccagatttatattaaacactatacaacacgacacatatataccattaaaactcattcannnnnnnnnnnnnnnnnnnnnnnnnnnnnnnnnnnnnnnnnnnnnnnnnnnacacgtcggacttggaaaccctgcgtaccaaactatcgcttgagacatccncttcgcactgcgtatacgagagcccgacgatcgcttcacatgccan

SEQ ID NO: 43 - DNA, 741 bp, Lawsonia intracellularis
  misc_feature (1)...(741): n = A,T,C or G
gcatatgttgatgggcgacctatgccaagttcttctaactctcggactaaggatgcttcggtaaactgtggtggtggttgggtgaatttttgttcctttataagggaatgtagctttagtatttctcctttatgtagcacgggtaagttagtatcttcttcctcttttgtgttgggaaacgcagctaaaaatccaggaaatagaagacgttctccttttgttctccactgagagttttcacaatttatagtaattattgtatcatggaattgagctacagacatttgtgatgcaataaatcgtgaccagataagacgataaatttgatattnnnnnnnnnnnnnnnnnnnnnnnnnnnnnnnnnnnnnnnnnnnnnnnnnnnnnnnnnnnnnnnnnnnnnnnnnnnnnnnnnnnnnnnnnnnnnnnnnnnnnnnnnnnnnnnnnnnnnnnnnnnnnnnnnnnnnnnnnnnnnnnnnnnnnnnnnnnnnnnnnnnnnnnnnnnnnnnnnnnnnnnnnnnnnnnnnnnnnnnnnnnnnnnnnnnnnnnnnnnnnnnnnnnnnnnnnnnnnnnnnnnnnnnnnnnnnnnnnnnnnnnnnnnnnnnnnnnnnnnnnnnnnnnnnnnnnnaaacccgcaaaaaccgttgcgccccgtgcggtttgttattccagttctggtataaaaagagtgacctttcggggcgatttgtaggttttactctattctatgccgggacaagggcg

SEQ ID NO: 44 - DNA, 788 bp, Lawsonia intracellularis
  misc_feature (1)...(788): n = A,T,C or G
ctcggtacccggggatctccacgaaaatcattccctagtttatctatttcatccaagagaataacaggatttttagttcctgcttgtttcatagcttgaataagccttcctggcattgcaccaatatatgtgcgtctatggccacgaatttcagcttcatcatgcataccaccaagagagatcctttgaaattttcttccaagtgacttagcaatagagcgtccaagtgacgttttacctacaccaggaggtcctgcgaaacaaagaataggaccttttgactttggattaagttttcgtacactgagatattcaagaatacnnnnnnnnnnnnnnnnnnnnnnnnnnnnnnnnnnnnnnnnnnnnnnnnnnnnnnnnnnnnnnnnnnnnnnnnnnnnnnnnnnnnnnnnnnnnnnnnnnnnnnnnnnnnnnnnnnnnnnnnnnnnnnnnnnnnnnnnnnnnnnnnnnnnnnnnnnnnnnnnnnnnnnnnnnnnnnnnnnnnnnnnnnnnnnnnnnnnnnnnnnnnnnnnnnnnnnnnnnnnnnnnnnnnnnnnnnnnnnnnnnnnnnnnnnnnnnnnnnnnnnnnnnnnnnnnnnnnnnnnnnnnnnnnnnnnnnnnnnnnnnnnnnnnnnnnnnnnnnnnnnnnnnnnnnnnnnnnnnnnnnnnnnnnnnnnnnnnnnnnnnnnnnnnnnnnnnnnnnnnnnnnnnnnnnnnnnnnnnnnnnnnnnnnnnnnnnnnnnnnnnnnnnnnctgggaacgctattttatagtatgcagatatatgtttt

SEQ ID NO: 45 - DNA, 789 bp, Lawsonia intracellularis
  misc_feature (1)...(789): n = A,T,C or G
nnnnnnnnnnnnnnnnnnnnnnnnnnnttcatgtcctgtaataaatgttactgacgatgtataatctctatgtgttaaaggaatacctgcatatgcaggtgcagcaatggtacttgttataccaggtatttcttcaaacggaataccagctaaaacaagtgcttcagcttcttcagcacctctaccaaaaatatatggatctcctccttttaatcgtgctattatttttccttcttttgccttagttataagtaattgtgttatttcatcttgaggtgaggtatatgatgaattaccttttttcccaacataaataatttcagcatctggttttgcatagttaagcaggatttcattaactaaaaaatcatacataataacatcagcttgctgtaatatttcttttcccttaactgtaagtaaaccannnnnnnnnnnnnnnnnnnnnnnnnnnnnnnnnnnnnnnnnnnnnnnnnnnnnnnnnnnnnnnnnnnnnnnnnnnnnnnnnnnnnnnnnnnnnnnnnnnnnnnnnnnnnnnnnnnnnnnnnnnnnnnnnnnnnnnnnnnnnnnnnnnnnnnnnnnnnnnnnnnnnnnnnnnnnnnnnnnnnnnnnnnnnnnnnnnnnnnnnnnnnnnnnnnnnnnnnnnnnnnnnnnnnnnnnnnnnnnnnnnnnnnnnnnnnnnnnnnnnnnnnnnnnnnnnnnnnnnnnnnnnnnnnnnnnnnnnnnnnnnnnnnnnnnnnnnnnnnnnnnnnnnnnnnnnnnnnnnnnnnngntncgttacagcaagtg

SEQ ID NO: 46 - DNA, 772 bp, Lawsonia intracellularis
  misc_feature (1)...(772): n = A,T,C or G
attcccgcagtatccatgagaatttttggactgtctaccgggttaattcttaaccttttgttacttggttactttaaatatttaaccttttttatggaaagtggttttgctctactagaaattttctttgaaccatcaattaattcatcacaactaaaaactattgcacttcctttaggaatcagtttttatacattccaagcaatgagctatcttattgatgtatatagaaatgaagtccctgtatctcgcaatatcattaattttggatgttacctcacaatgtttccacaacttgtagcaggacctattgtacgatacatttcttatacaaaaagaacttgaacatagagaactttctccacaacgcatatcaagtggtattggtcgatttattataggtcctttctaaaaaacttcttattgcagatactcttggaaggagtatcagaacaagcttttgcaattcctacannnnnnnnnnnnnnnnnnnnnnnnnnnnnnnnnnnnnnnnnnnnnnnnnnnnnnnnnnnnnnnnnnnnnnnnnnnnnnnnnnnnnnnnnnnnnnnnnnnnnnnnnnnnnnnnnnnnnnnnnnnnnnnnnnnnnnnnnnnnnnnnnnnnnnnnnnnnnnnnnnnnnnnnnnnnnnnnnnnnnnnnnnnnnnnnnnnnnnnntctaccatctggcggatcaaacccaaatggcccttaacaactgcttttgcgtaagtaacaccccgaccgaaacacattacccctagggttgtgtcctn

SEQ ID NO: 47 - DNA, 735 bp, Lawsonia intracellularis
  misc_feature (1)...(735): n = A,T,C or G
gagtgggaacatagtgtgcctgctgagaattttggcagagcttttactgaatggcgcgaaggtcatcctctttgtgtagataataaaggtaaaagtttcaaaggacgaaaatgtgcagaaaaagtaaataaaacatatagatatatgcagtctgatatgtacaatttgtttccagcagtcgggtctgtcaatgctgcgagaagcaataagcaatactcagagttacttggagttcaatctgcttttggaacgtgtgaggcaaaaatagatgggaatagattcgaaccaccggatagagctaaaggtcaagtagcccgtgctgctctttatatggataaagagtacaaggaatacaatctaagtcgtcagcaaagaagactttttgaggcttggagtaatatgtatccagtcgatgaatgggagtgtacacgagccaaacgaatcgaatctatacagggaaatgaaaatatttttgtaaaaaatatgtgtatcgaaaaggggttatggtaaacaaacgaggacaatataaatactacctaagtaaatcatataaaaacagatattttttgcgccaagaaacaatagagagaagtccagcttactgnctgaacttctctttttattactcagagggatatgacgcaatcactgatatactaactttctagctatgctatcgncaacagacttaaccagcaaaagacccaaatcgttatggtacgataccccactatg

SEQ ID NO: 48 - DNA, 791 bp, Lawsonia intracellularis
  misc_feature (1)...(791): n = A,T,C or G
nnnnnnnnnnnnnnnnnnnnnnnnnnnnnnnntatgattttgataaaattgtagaagtggctgaaaagcaagatgttgcatttattttactacatggttcaccaggagaagatggaatattacaagctttattagaaagagtgggctgtccctaccaaggggcaagtccagcaggttcactgcttgcactacataaagctgcagctaaagctcttttccgtagagaagggcttcttacacccaaaagtgtctttctgcctttaaagccagaagtaacttgggaacctgggttaaattatccaatttttgttaaatctaatattggtggctcaagtgtaaatgtacatctggtaactaattatgaagagctatttattgctatggaagcattgtttaatgcaggtgaggaagtcttattagaagaagctattataggacaagaggtaacttgtggtgttattgatgatcaagcattacctcctattttaatacgtagtcagggtaaattttttgattattataataagtatgctaagaatggtgcagaggaaatttgtcctgcgcctcttgagcctcatgtattaaaacatatccaagagtatgcccttagagctcataatacaataaaattacagggatgtagtcgggcagaccttattcttagagacgatgaagtgntatttcttttggaagtaatacaatcccaggntgtttgtacaagtcttgtccaagagagcagcactatgggctactttccagatagttgaagtgatcactgcatcgagacatan

SEQ ID NO: 49 - DNA, 713 bp, Lawsonia intracellularis
  misc_feature (1)...(713): n = A,T,C or G
ctccaccaggataaggtagccctaacatttttgcaaacttatcacaggcttcaccagcagcatcgtccaatgttcttgccaaaagaataaaaatatctggagcatctattttataaatgtgtgtatgacctccagaaacaaggagtcctaatgctggatactctataggttcctcaatagctgccacaaggagatgagcatgtagatgattaatacctattaaagtcttaccagatgctaatgctagaccttttgcaaaagctaacccaacaagtagtgctcccaataaacctggtccacgtgttacagcaataacgtctaagtcagctaaggtaaccttcgcatcttccataagtttatcatataatggtccaaggcacctataatgctctcgagatgcaagctcaggaacaacgccaccaaatagagcatgtaaaggtgcttgtgttcctaagatagaacctatacattttccattttcaacaagggcaacagcaatctcatcacaagatgtttcaatttcaagacataacataagaataatacataatatgatgtaataataaataaaatagtgaattaagatgattactagttaagagataggaacaaatattggagattatatataggaatatcacttatacttggatagaaggtagcaacagccttaacatcttttctaaaacctatgacctagggaactccgtttn

SEQ ID NO: 50 - DNA, 765 bp, Lawsonia intracellularis
ctcggtacccggggatcttgtgttcgagcattaaattctttacaaaattgcataatatttaacccatgttggcctaaggctggaccaacaggaggtgatggatttgctacacctgctggaatttgtagttttattttagcaagttcttttttagccattgtttttataacctctaatttgactagagtgttatagaacctatgctaattgcataagttctatctatatattttatctttaccccttagaaacttggataaaatcaagctcaacaggggtttgtctaccaaaaattgatacagaaactcgaagtttccctttatcgtaattgacatcttcaacaataccgttgaaaccaccaaatggtccatcaataacacgtatttcatcaccacgttcaaagctaaatttaggccgtggttgttcttggcgtgtttccatgagtgaaaggatctttgaagcctcttcatctttcattggtgcagggcgattttttcctccaacaaacccagttaccttgggtatagtttgataaagtgcccagaataatcagtcttagtcattcgagcatgatgtttcctgatagatttacgtgtaagcgacgttttagaccacctttccttactaacgactcgtaagtggttgacacctcatgataagaccttatctgtcactacgctatttttttatagggttcacacttgtcaatccgaatagttgacaaatacatcagacttctgatcttaagtgactgagctgcacttg

SEQ ID NO: 51 - DNA, 791 bp, Lawsonia intracellularis
  misc_feature (1)...(791): n = A,T,C or G
cccgttgatcaagacaaaaaagcactcgccattgcagaaatgacgttaaagccttttaagaaaagggtgcatttagttcatactaagtatagttcttttcctctaatattaaaggctcttggttggaaattattagatggagctctcattgatataggtgtttcttctttgcaattagacaatgcagaaagagggtttagttttttatatgatggtccattggatatgagaatggatcaagatgctaataataactcactgtttgagatagttaataaaagtcgacaagaatacttaaaagatattatttctcgatatggtgaagaaccacaagcaaatagaattgctaaagccattgtacaaaaacgaaggactaagcctattacaaccacaaaggagttagccgatcttatagaacaagcttacccagcagcatggcgtgctaagtctcgtcatcatccagcaacaaaaacgtttcaagcttttcgtatagtggtaaatagtgagcttaatgagttagaaaaatttttaaatatgattatgggttggatagcaccaggtggaagagttgctgtgatttctttcactcattagaagatagaattgaaaacagtatatgaagtcatggacaagaagtgtatctgtcaccatatgtcccgntttgcaatgcttcataaacctgaagcatacttatacaaagaacctatcgtcctcagaaaagaatatcagaaatatcgtctagatgcaaagtcgtgtgcaaaaatgtgcttgagagtaatnatttcatcaag

SEQ ID NO: 52 - DNA, 756 bp, Lawsonia intracellularis
gcaaaataagtccttgcggctgcctcaaccccataagaatgagcacctaaaaatgtctgatttaagtatatagttaaaatttcatctttagaaagatatttctctagacggtaggcaagaattgcctcttttatcttacgctcataacttctttcagggcttaacaaaagacgtttaatgacttgttgagtaatcgtacttccaccttggcgtgttgtccctgattgaagatttattaaaaaagcccggataatagcaagcggattaacaccttcatgttcataaaactcagcatcttctgcagctaaaaatgccttaggcaaaaaaggagacatttcgcttaatgggataagaaaacgcttctctcgatatatatacccaataagtgttccatctctagcaagaactgttgttactaaagctggtctatagtcattaagctttgtaatattaggaagatctctactaacccaaaaataaagacctattagtcctataatagatagtgaaataattcccaaccaaaaaattaccattttccgaaaaaaccttttcatgtcaaagctgataacctggttcaatcctgacgtaaagaaaaagtggtacctattcaaataataattataaggtgaaatccttttaatttttaatcccccctagattccactcgtttaaaataccaaattacaataaatccctttttacctttagttcaaggctttttagaatgggcttgcggggaccacataacattag

SEQ ID NO: 53 - DNA, 799 bp, Lawsonia intracellularis
  misc_feature (1)...(799): n = A,T,C or G
gctcggtacccggggatcattgccgagggatattacttgttctggagaaaggaagaccaggaaatatatataactttggtggctctgcagaacaaaccaatcttgctgtagtaaaagaaattttacatcttcttaataaaccaaactctcttattcatcatgttaaagatcgccctggtcatgatcgaagatatgctatggatttctcaaaagcagcaaaagaacttggatatatgccacaaataacatttaataaagggcttgctgcaacagtaaactggtatctctctcatagagattgggtacaaaatattctttcaggagactataaagaatttatgaatagatggtataaggatcgcttgtgaataataaagtagctcttgtccttggtggaaatacaggtttacttggcaagtctcttgttaggtgccttcaacaaaaaaactgggatgtacatacacttggtagagaagatggagatattttacaaccagattttctgagtaattacattgataaatgttctcctaatgctnatcttaataccattgcatggactcaagtagatcaagtagaagtgcttattcttcaacagagggaagaatatgaaaagttgtnccaacaacagaaagaagaaagaaaccatntngaggaataaacgagctttatacagtctatctcttaaccatagggtacaacaagcagtgtcacacatgaggtcagcacagtacacagatcattgtaggcaagccaggactcaatagagctgtgttctagataattcctgtacgagagg

SEQ ID NO: 54 - DNA, 726 bp, Lawsonia intracellularis
  misc_feature (1)...(726): n = A,T,C or G
ggtttatccggtatgtctataactgaacaatggaactattggcacaaacacttttctatttccaatcaatatatacgttttatagcctacctacaatctttttccaatacctacggaccattaagtaaattttcttctatcttagctcaaattaagggtttacaggatgttgcaggtatttctgtaggtactagacctgattgtttaacaaataaaaaattatctttaattgtagaaatgccttatttagaaaaatgggtagaatttggtgttcaaagtcttcatgatgaaacacttataaagattaaacgtggacattcttctaaatgctcagaacaagctattattcaagctgcaaatgcaggccttcaagtttgtgcacatgttatgtttggtcttcctggagaaacccctacccatatgttgcaaacaatagatagactaaatagtttacctattcatggaatcaaattccataatgtttatgtttgtaaaaatactatacttgaaaaagagttcaatgcaaggaactattattcaattactgaagcagactattctgacccttagagtcaactggagcatgaaacttgcactgcccgtgtttacaactctgacgggaaaccctgcgttccaattaacgcctgaaaaaatccttttgccgtgggaaaaggaaaaggcgacggacgcttccaaattgccacctaaggaaagcccttgcgtttn

SEQ ID NO: 55 - DNA, 766 bp, Lawsonia intracellularis
  misc_feature (1)...(766): n = A,T,C or G
cccggggatcttgtaaaaaactattaggtttttgaccaaatacacctaataaaatatctacttttcgtataatctcacgaaattgttcaaaaaccaccttcccatcagttgtggagtaaagagctttatcatcaagagcacgtctaactatatggataatattaaataaatgacctaatccagcagctgtattgcaatcatcttctagcgcagacataaatagtgaaaattgttcatctaactcagctaaaatagagctagatgaaccacctgagtcccaagattttctttcaagtgctttatctacctcagcaatacattcatacactcttttttgacttcgttctgtctcattcattccttcaaaagaaaaatctatagggcttctataatgcttttttaaaaggaaaaaacgtaatgtttctgggagatatgcttctaatatatctctaacaatcttaaaatttccaagagattttgacattttttctgaatttactngaacaagcccattatgcatncaaatttagccaacggcttattacaattgattcagcctgagcaatctcatttcatggtgtggaaaaatagatcaattctcccccatgatatcaagaggaatggccacaactttactcatgctgacattaatatgcaccaggacgcctcttcccaagactttcaagagctctcaagctactgcttcaagacaaattaagatcttaagcgactgagcagcaactgcactgccgctttcacgctgatg

SEQ ID NO: 56 - DNA, 796 bp, Lawsonia intracellularis
  misc_feature (1)...(796): n = A,T,C or G
nnnnnnnnnnnnnnnnnnnnnnnnntttatgcaattacagatgatgcactttcttttaacaggtctgttatagaagttgttaaacaactattagatgctggaataaggattatccaatatcgtgaaaaaaataagtcttcaaacagtatgcttaaggactgtataacgatcaaaaaattaacagaagaagctaatgcatgttttattgtaaatgatcatgtagatattgcagtactatgtaatgctgatggagtccaccttggacaggatgatctcccagttgataaagtacgggagcttataggaaaagaaaaaattattggactgtcaacccatagcccacaacaggctcaaaaagctattgaaatgggcgctgactatattggtgtcggacctctctaccctacaaaaactaaaaaagacgtatgtgaacctgttacaattagctatcttgattgggttgtcagccatatagctattccttttgttgctattggtggtatcaagcaacataatatccaagaagtcattcaacatggtgcaaagtgttggccactcgtcttaaaaattcttagtgctcctaatatacctttacgtttacaagaattacttcaagtatactttggctcaacatagtgattgacctttatttaaaattttaatatcctctttcttttattggcatattaaaagaatacttaaaggcttactaattaaaaggtgcttcctttaagcattaataatggaaataatcttttttaaatcgttggaatgttgatggttcctccaatcatcn

SEQ ID NO: 57 - DNA, 776 bp, Lawsonia intracellularis
  misc_feature (1)...(776): n = A,T,C or G
attataagatggcttnntacactgatctactctttgatttactatcttcttccttaattcggggtgattatgttatagacgtgaatcttagaggtgcatttatatgtatgcgtgaagcagcgaaaataatgacaaaacaacgatatggacgtattataaatgttacttctgtagttgggcaatctggtaatgcaggtcaggtaaactatgcagcagcaaaggctggcttaattggaataacaaagtctgctgctaaagaacttgctagtcggaatattacagtgaatgctgtagctcctggatttattgctactgatatgacagcaactcttagtgatgatgtacaaaaagcatatcaagaatctattcctttaaaaagattgggaacacctgaagatattgcagaagctatactttttttagtatctccaggtgctggttatattacaggacaaattcttgcagtaaatggtgtgatgtattggtgatgtctttttactattcctatcttttattaaaacctacaaaatctaaatattaaatattgtttcataacattaaaaagactaaaaaggtggaggatcctttaaagtcatctgtagcatgcatacttgtgattggccgtctttttaaccgtcgtaactggaaaaacctgcttaccccaattaatggctttgaaataatcccttttgacacgtgggtaaaatgaaaggtcctaccgatgccttccaaattggcacctgatgcgatgggctgatgggtattccttaacattg

SEQ ID NO: 58 - DNA, 776 bp, Lawsonia intracellularis
  misc_feature (1)...(776): n = A,T,C or G
nnnnnnnnnnnnnnnnnnnnnnnnnnnttcaggtaaatcagttttctctctccatacaacccagcccatacctaaaggtgcaagtccaaacttatgtcctgaagagttaatagattttacacgaggtaagcgaaaatcccatactagctcaggctcaataaatggtgcaagaaatcctccacttgctgcatcaacatgaatgggaatatcccatcctttcttcttttgtaatgcatctaatgcattactaacctcttctacaggttcatactgacctgtatatgttacacctaatgtagggaccacgcctattgtattttcatcacagcgtttgatggcttcttctggtgacataataagtctatttttttccatgggaatttcacgtaactcaatatcccaatagcgagcaaatttatgccaacagatttgtacaggtccacatactaagttaggcttatctgttgattttccagctttttttctttgtgccctccatctccactttaatgccataccaccaagcatggctgcttcactagaaccaatagctgaacatnctattgtatttgttnnnnnnnnnnnnnnnnnnnnnnnnnnnnnnnnnnnnnnnnnnnnnnnnnnnnnnnnnnnnnnnnnnnnnnnnnnnnnnnnnnnnnnnnnnnnnnnnnnnnnnnnnnnnnnnnnnnnnnnnnnnnnnnnnnnnnnnnnnnnnnnnnnnnntccacaatggcaactgatgcgatgcgccgagcgattttcctaccattggcgat

SEQ ID NO: 59 - DNA, 771 bp, Lawsonia intracellularis
  misc_feature (1)...(771): n = A,T,C or G
acttcaggcccatctccccactccttcttctccacccgggatccaacggcctgactctttccataagtcagcaggttgaaccataggcattaaaatttcttccgcacctattctattcatctcacttcttataatagatatcgctttattaagcgtctttagccccaatggtaaccatgtataaatacctgaagtaagtttacgaatcattccagcacggattaataatttatgactaagcaattcagcatcaccaggtgcttcttttaatgtagggatataacactgcgaccaacgcataatgacctcaaattattataatagtttaatacaataaaaatagtatctgaaaatggatagttacttttcaaactgtttcttaatatgacctgaacaacaaaaaagatttattttgttatattaaatattgtgagttgaacgtcgagctcgaaaacgtttttcaataccacggacaacagcacttttggatcgtgcccattctggtgctacaagctcttctggaagagggtcagcttcgactctatgaatcacaatatctgggacgtacctatataatgattcaacaccaaaaccctttgaagcgacctgtcggcatgcaacctggnnnnnnnnnnnnnnnnnnnnnnnnnnnnnnnnnnnnnnnnnnnnnnnnnnnnnnnnnnnnnnnngccatacccccttcctcacttgcggcataccaaaagcccggaccgtcgtcctccaacaattccacctaatgcgacgcgcctg

SEQ ID NO: 60 - DNA, 711 bp, Lawsonia intracellularis
gcttcttgtttctgcaggttttggaattattactggtggcggaccaggtttaatggaagcagcaaataaagcagcttttgaagctggtggacgctccattggattacatattcatctccctcatgaagaaggatgtaataactatcttacaatacgtacagaatatagatatttttttataagaaagcttatgtttgtgaagtacgctcaagcctatgtcgtaatgccaggtggaatgggtactatagacgaattttcagaagcatttgttcttacgcaaacaaagcgtatccatcctttccctattatactctataatagccaattttggaatggattagtcgattggatgcgacaaacaatgtctaaagaaggttttattgaaccatcagagattgatgctcttcttaatatctgtgatacaacctgagaagttctcaaaattatttaagaaaaaagttcccactgcattacacattaaaaaaattaaccttagccggttcattcatatccttataactaatattccttaatggaccttatacaacttaagatataattagttatatttcatcaaataaaatggatattacaccaaataaaaatgtgttgggggccataccaacaccaccataggttggactgtggacacttattggtgaagcccctctgagcaaacaagtcacaaaaaatggaaaccgttggaccatt

SEQ ID NO: 61 - DNA, 777 bp, Lawsonia intracellularis
attaccgggtgatctggatgaaagacttcaaagtcagaaagtttctcaccggttcccacatacttaactggcacaccagtagatgaacaaatagatagtgctgcacctccacgtgcatctccatccatctttgtaagaatggcacctgttaatgaaagctttttattaaactcctctgcaacagttacaacatcttgacctgtcatagcatctgcaacaaaaagaatttcttgtggatgtgcaacaagttttatatctagaagctcttgcattaatggttcatctatatgtaatctcccggctgtatctaacaaaacaactgtatactctttttcttttgcttcatgcagcgcagcattaataatatctaatggcttcattgccgcattagatgcaaaacatgggatattcagttgcgttgccaaagtttgtaattgttcaataacagcaggtcgatatatattaacaggaacttagtatggacgtaatccttgactctgtaataaagaagcaagctttcctgaaaatgtcgttttcccgaaccttgaacccaacatggctaataacacttatggaaaaggcgttcaattatattggtcgactttctcccaatagttaacaattccttataaaaaacctttttaactgtttgccgggataaaatgtttttttttctggcaaaaactttcttttttcatgtctatatctttttaaacgtataattaaaatagttttataactaaagtccttcattccgtccaatttattctaagtgcg

SEQ ID NO: 62 - DNA, 746 bp, Lawsonia intracellularis
cccagtacaactagctacatttaagcaacaattacaagaaggtaagcgtactattgatgagttattaccagaagtttttgctcttgtaagagaaacaagctttagggtgttaggaatgagacattttgatgtacaactcattggtggtatttcattacatagaggtaagatagcagaaatgaaaacaggggaagggaaaactttaatggcaacactttctggtgttttaaatgctcttgaaggtaaaggggtacatgttgtcacagtaaatgactatcttgcacagagagatgctgaatggatgggtgcattatatagtgctctaggtttaacaacaggtgtggtgacatcagggctttctgatgatgctcgtaaggaagcatatgctgctgatattacttatggtactaataatgaatttggatttgatttttcacgtgataatatgaagttttatcctaatcaccttgaacaacgtggacacttttttgctttattgaatgagtagattctatccttatagatgaagctcgtaccctgtttattaatcttggtggggagaacaatctacaactttgtttctctcaattcgataaattttccttaattttagccccacaggatttttttttgttaaaaagaaaggagtctttttcatgaaaggttcttgcaagtaaaaagccggttaaaaattgttaactcttaggcgccttcagcgacacgtggctcgcccctttttaaacgtg

SEQ ID NO: 63 - protein, 192 aa, Lawsonia intracellularis
RGVKGLLLHDHAEVLSIATGKRGARATRGIRHLYTDGSRPMDFNFVHSVDPIDIGRAAVDTAVLVNVRGETLRKIAENRKGQVMEGELYCNNIGAERLWNALEHVRERKRVFVISRTAEPQKLLHVLLATKHELDDARYYWQHIKKRERSSPNASLKVPDKLLREAFDQIADGELTASFLLNTVGGRKGAIN

SEQ ID NO: 64 - protein, 78 aa, Lawsonia intracellularis
DAPQVMPMLIEEAGIRNMESRIISIAKNLTKLGLPLWTYIGSTLKRIMGARILLEHSLLEADGPAEKLTPIYCQSWRM

SEQ ID NO: 65 - protein, 200 aa, Lawsonia intracellularis
WQEHQTTRELMVFLQPYGISVTYAVKIYKYYGQQSLNIVKENPYRLAMDIHGIGFLTADALATKLGFEKDNPLRAQAGILYTLLKCMDEGHVYYPKEAFIELTSHNLGIDHQCIEDAIEHLKREERIVCEALDEHIGIYLNRYHHYESQIAFYLQRILHSPKSVQFKNTDDTISQVINKLNITLAPEQMSAIVTSTTSKI

SEQ ID NO: 66 - protein, 169 aa, Lawsonia intracellularis
VRPDLLVAPLMNQGKSYMYSIQRKLASRVYETLMVTDKEKPSWEILAELISRLDRISIQEQVLRQFIEAIRQVPLLRTTERVLDPAREEMKDLLYKTEQMGLFNSAHRSLVLSLHYALIRSHTMCTIGARELLAKKSDPVWLSEVDPLFNEKEEPEVGLMALNEKTDRQ

SEQ ID NO: 67 - protein, 118 aa, Lawsonia intracellularis
  VARIANT (1)...(118): Xaa = Any Amino Acid
QLQRIAELFPLGXXXXXXXXXXXXXXXPTNNDISSKALSLITSKIEDTIHPIVQVTAGLYDGRREKSIVKYYIAGSTSNNKQSLSTGLFREYHGLDLDAEAGDDTVYVEGHQYPNMTG

SEQ ID NO: 68 - protein, 141 aa, Lawsonia intracellularis
  VARIANT (1)...(141): Xaa = Any Amino Acid
RRMSINLVLGILIFNVLTASGGYSLFPLPIGVVPMLGLVMGINVFFQWFFYMFIGAALTSGFRDKAGKVTNFIGLLFLCFLGMLTICGLFGWEEGFVAIAFDTHKEPLFRFQSQTGQLFGKGXXXXXXXXXXXXXXHYGSG

SEQ ID NO: 69 - protein, 115 aa, Lawsonia intracellularis
DTALMDIIGTKIAERLAMIDEQTRLPPNVKANTNYGIVAREDLLLYHPCTEATVKVGRSKGWSIAEVTRKASVHAIHVPVNLYEALLISRIAQLTEAIDPQGSLGLKGSIFGENM

SEQ ID NO: 70 - protein, 125 aa, Lawsonia intracellularis
IIPLRGNIDTRLRKLMAEEFDAIIMATAGIKRLGLIAPYMSSLPCSVMLPAVGQGALGIEVQKERQDVLELFSFLNHKETYHCIQAERDFLAGLDGGCQVPIAGYATICKQETICLEGLVAKSDG

SEQ ID NO: 71 - protein, 136 aa, Lawsonia intracellularis
ELVKQRTMNNPVYYVQYAYARICSIIRKAHDLGFTITDVNEVPLSNITTKDELNLLRLLDKFEDVIYNAAQHLAPHYITHYLMELAGELHSYYAKYPVLQSNEKTIVLSRLALLQAVGQVIYNALNIFGVTAPKNM

SEQ ID NO: 72 - protein, 121 aa, Lawsonia intracellularis
SRGSTAALAMLNDAIKKGGAFASSQLGGLSSAFIPVSEDASFAAAVQSNILSLEKLEAMTCVCSVGLDMIAIPGDTPASTISGIIAVEMAIGVINKKTTAVRIIPVPGKKVGEKAFFGGLL

SEQ ID NO: 73 - protein, 154 aa, Lawsonia intracellularis
SVPGDQQDVMAVRQTGFSLLCSSSVQECMDLALVAHLSAIESRVPFCHFFDGFRTSHEVQKINVIEYEEIQKIVNWEKIHIFRKNAMNPEHPYQRGTAQNPDIYFQNRERSNPFYNAVPGIVIDSMQKVFSITGRQYQLFDYVGHPEADRIIIA

SEQ ID NO: 74 - protein, 165 aa, Lawsonia intracellularis
AVGEIGLDFYHKDCTATLQEEVFRAQLNFAREMRKPIVIHSRDAARDTIRILESEGCIAYPVLWHCFSGDAVSFLDRILSNGWNISVAGPVTYPGNKELQEVIPMIPEDKLLIETDCPYLSPVPWRGKCNEPALVVFTAAYIASLKKIDIIELWTQCGENTKKFF

SEQ ID NO: 75 - protein, 142 aa, Lawsonia intracellularis
GSVVKVINELTHITDGPNIREPSYGVTFDTLYSLGSVEELLPICIEETAGPYVTSEYVVVCGQRMHRAVMQTAKILPTFDPNRYTDIPTPVAIIIIDAQHIDTQNYSFSAKTNDLVESSIEGTRDYKRLLEHIRRKSIDFGI

SEQ ID NO: 76 - protein, 143 aa, Lawsonia intracellularis
KRCKWPPIARKKSWLGFKNKRSFEELEYWYNCMVDSCYKPYVWALGKRLLHEQLTLGDELYIIALTRGYIDYGMNKVVINGHEVLFETARKALLGFPQSLEPSDIGYLRLIKKNGPKYLSLSKGDIVKIFSEPRAMRLYPPLT

SEQ ID NO: 77 - protein, 131 aa, Lawsonia intracellularis
LSPEQTVIITTGSQGEPLSALVRIISGEHRYLSIHEGDTVIMSSRVLPNSTLAVNRLINRIYRLGATVCLNGQKAIHVSGHARQDELKILLTVVNPQYFVPIHGEYRQLFRHKELAMQHGIPSENIFILDD

SEQ ID NO: 78 - protein, 98 aa, Lawsonia intracellularis
EIVRSGFKNMIGAGVVLTGGTALIQGCQELGEQIFNLPTRIGYPRNVGGLKDMVNSPKFATAMGLLHFGAEKEGMEQRFRIRTEHTIFNSILSRMRKW

SEQ ID NO: 79 - protein, 141 aa, Lawsonia intracellularis
LLKEYFEQEALGLVNRVVNETLIGNSFMLTQGLLSMSDRISGSARRAILQIANDEYCINEQKLVHILNYILEEKTLPKLVFHQCRSIITVPFKHLETTAFVFTSFPPPEELTELLANFSERTLMHAEDIIFVKYRGEMPAY

SEQ ID NO: 80 - protein, 131 aa, Lawsonia intracellularis
  VARIANT (1)...(131): Xaa = Any Amino Acid
MEIRGTTILAVRHKGHVALAGDGQVTLGQSVVMKHTAKKVRRMYKNQVIXXXXXXXXXXXXLFERFDNYLEETNGNLVRAAVELAKEWRKDKYLRRLEAMLLVVDKDHTFVLSGTGXCIEPDDGIAAIGSG

SEQ ID NO: 81 - protein, 126 aa, Lawsonia intracellularis
RTLSDYANNILILSAVPSLDTGVCDIETQRFNSEAAKLGEKVRILTISCDLPFAQARWCGATGVSAVETLSDHRELSFGYAYGIAIKELRLLARAVFVVDTNGMITYQEIVPEMTHEPNYTAIFEA

SEQ ID NO: 82 - protein, 163 aa, Lawsonia intracellularis
GKPAPLQQVIAELVSDVGLGTKASISIATSCDLGITEEIEAKVKEIDASPLDIKNLIPIVEHNHELALYVNALTQAEVGQTTDIVLLSGECASLSRSVEYNFDVHGPTDILNLIYTKGDATIYPIRVTQAKITIGRERELEMKDLYQDRKERDSVLNTYELIK

SEQ ID NO: 83 - protein, 189 aa, Lawsonia intracellularis
  VARIANT (1)...(189): Xaa = Any Amino Acid
DHDNRYITYNSEAILLAIEYXXXXXXXXXXXXXXFHLICDATNADVVNTLRYRKNRPDKPLAVMVPNINIARQIAYISEVEIQKMQSPECPIVILKAIPHSLPKNIAPDVSTIGLMLPYTPLHHILCNTLTKVAELERIIPALVMTSANVSGGTIIYNNDDALIRLNTITDFFLFHNRNIIVPVDDSVV

SEQ ID NO: 84 - protein, 72 aa, Lawsonia intracellularis
SAVPTSLLFKGQIIRLLTGLILLAIVGNSFIFIPIAMQGVVSEPNEIFFHLSSVSLASVGFSFAWFSVSFPQ

SEQ ID NO: 85 - protein, 103 aa, Lawsonia intracellularis
LYGSTCLAHTGQSIQYGNPLDPYFYNKRSFFSHTNITCHLALGAKVAYEVALKNLSPLAGPMGACIECINTNPPTGFTTPCSCFLKSKTGLQVHVELGIVAEF

SEQ ID NO: 86 - protein, 207 aa, Lawsonia intracellularis
IGEELFLGIMLLKWISAPPYTSQITRNQLPHRPNDRLIEWNKQSLGRVFLNNDYAPTTVLAQLRGTHPEIVIVCAAHTDLLSVIKQQLQADLSLQIDEGHQPAKVLVKGLARGLVDVEVSYEGKEGRLRPELIYELGQKGITDGLSLVKDMALEKENAEAVYGLIHAFEHSQPYYRKSHAVTILGPWHMLQSDIKAVQECPIDTVVP

SEQ ID NO: 87 - protein, 157 aa, Lawsonia intracellularis
HKHFSISNQYIRFIAYLQSFSNTYGPLSKFSSILAQIKGLQDVAGISVGTRPDCLTNKKLSLIVEMPYLEKWVEFGVQSLHDETLIKIKRGHSSKCSEQAIIQAANAGLQVCAHVMFGLPGETPTHMLQTIDRLNSLPIHGIKFHNCYVCKNTIPEK

SEQ ID NO: 88 - protein, 83 aa, Lawsonia intracellularis
LILDEATSSLDSESERMVQGALENLMRNRTSLIIAHRLSTILESDRIIVFEDGKIVSSGKHKELLGSCELYTRLYMMQFRTGE

SEQ ID NO: 89 - protein, 88 aa, Lawsonia intracellularis
VTSPHKVAFPARCAVNISYEKHLCSQVFPAGIPVEGFFEGMVELFDADLKRKGFDGIALPAGSYELHKINGVRLDINKSLDELGVQDG

SEQ ID NO: 90 - protein, 181 aa, Lawsonia intracellularis
RKLQVATQLMNDSTQIAKSNMEYARQGVIMQVMEDVVEVNSMELFGQAITGLNEEGPVGEVAEGSAETPIYLNRGKADLGAPNVFSYLPIEGAAIEQGNADLATIRGRESIAVSKADPPVTFEPQLPYGNATVLTGDQNLKFAGARTYMLQDGVLVQSFGKGEIAMNLPNGTNQSDGPYFI

SEQ ID NO: 91 - protein, 60 aa, Lawsonia intracellularis
MTEPKEMWHCQITNCGYIYNPERGDKRAKIPPGTEFESLPDNWHCPVCGASKKSFKPLTD

SEQ ID NO: 92 - protein, 176 aa, Lawsonia intracellularis
  VARIANT (1)...(176): Xaa = Any Amino Acid
DPKYSDQMVRGAVTLPYGLGKTVRVAVFCXXXXXXXXXXXXXXXXXXXXLVAKIKDGWLDFDAAVATPDVMALVGQVGRQLGPRGLMPNAKTGTVTFNVTNAIKELKAGRIDFKVDKAGVLHAPLGKVSFGSEKILGNLKSLVETVNRLKPSSAKGTYIKSMAISTTMGPGFKIDT

SEQ ID NO: 93 - protein, 169 aa, Lawsonia intracellularis
DPLKTNVVFNSKWLMSMSSVDFIRLASHYTLARMLERDDFSNRYKENTPIALHELLYPLMQGYDSVALKSDIELGGTDQKFNLLVGRTLMSHYNIEPQCILTMPLLEGLDGVRKMSKSYGNYVGIDEQPYVQFSKVMSISDELMWRYYELISTSSLSEVEKLKQNVKEG

SEQ ID NO: 94 - protein, 178 aa, Lawsonia intracellularis
  VARIANT (1)...(178): Xaa = Any Amino Acid
SEVGKSTLMGMMARYTSADVNVIGLIGERGREVVEFMEKELGPEGMTRSVLIIATSDQSPLVRMRXXXXXXXXXEYFRDQGKDVLLMMDSVTRFAMAAREIGLAVDEPPTTKGYTPTVFAQLPKLLERTGRSNTGTITGIYTVSVDGDDFKEPIAEACRSLLDGTYCSTLYPGDQDHF

SEQ ID NO: 95 - protein, 136 aa, Lawsonia intracellularis
GCKLEVYKGLTEDQVNEMVATLIYRGIDVEKSPGGKEGFSLLVAEEQLISALEILKKNALPRENYVSLGEVFSGQGMISSQSEERARMAYAISQELANTFSRIDGVLTTRVHVVPGYTDQAVDLRSFIYGIFISIR

SEQ ID NO: 96 - protein, 161 aa, Lawsonia intracellularis
DRVRSAGVGVFMEVFDSGSISFFPVGAEGAVARALLTKGTGPPGVLLVGKPIRGGLRTFKRPNSLFDVVESLEEKAEDVGAVDEFTVRGQEQNLMRARSRGFSMARGAGGQMQRMFFVWVGILLLMHFWSVLLTIYWPSDEIPEARVDVHQEILKSVLQPD

SEQ ID NO: 97 - protein, 163 aa, Lawsonia intracellularis
EISLIYGKGWLNRESISGSVGFKSHTSYGVGGTIAGTRAEQVKVLLDVEDDKGTPLTDTDVQNFYGLRNLCENSRRLHQGNFLDGDALRLERLIVNDRTRTNGEVIIRRLFVKQKKDILFTVDITADEENKTTELDVEAFAYGYDSYFDTLAKVDDQMVSLSF

SEQ ID NO: 98 - protein, 129 aa, Lawsonia intracellularis
DPLDSTSRILEPNFVGEEHYTVARGVQKILQKYKELQDIIAILGMDELSDEDKLVVSRARRIQRFLSQPFHVAETFTGTAGEYVKLEDTIKGFKGILAGEYDHLSESDFYMVGNIDSAVAKYEKRKESK

SEQ ID NO: 99 - protein, 187 aa, Lawsonia intracellularis
  VARIANT (1)...(187): Xaa = Any Amino Acid
LWPCDIITASDYWINSSGNDLREAVIVKRASXXXXXXXXXXXXXXXXXXXXXXXXXDATFSRITMLAREFSEANLPETSRVAMQWFGYGANCRYRVGFPISDTTFVHENEPNTIVQLEPLSREQFLLPRLPRSVDLMFWPAVXXXXXXXXXXXXXTPSLSNSVLTEAGSGDENXYIVHATDFFXHGD

SEQ ID NO: 100 - protein, 152 aa, Lawsonia intracellularis
GIEPTVILKRKGKSEGAYTVIGAIESVVAMDKPKRVEFLEAVRPLGGVIDRTKSTERPKRAIIDGAQVEQGDKVMIIAGAPLSYIAPTTSTIRQKTQGEADCISISPRFSTTRYEIITMSSQHTAEDLKEQYTKGDILDTFKIFGNVESVFP

SEQ ID NO: 101 - protein, 148 aa, Lawsonia intracellularis
NILQTLNKATSLVAERTAADEPRLSLNQWGKFFEGLLSSIGTRNSENFISEISNMIASQEDWRTNQSFRNLYADEVFRNFNRYIEATHVGQGLMGPTQNLGYRDEFRVSQRSYGQTNVNAINNGTVNLATQNGAIASKGIGFLTNISM

SEQ ID NO: 102 - protein, 175 aa, Lawsonia intracellularis
AESWERPRRLIGKNEIINLGTPQGFGLKTLYYYFKQSGLELSIKGCGINSSHSLIKTVSLEKQPTGDDRIVVNKIKWVGGECNFLTDKTVIGEQLAAAILFPKFTSGPEFADLALRNRYESPKYQRYANPNFFPYQSWALIESSKVDVILVGGWKAGVESVAQAIADEAISQKQL

SEQ ID NO: 103 - protein, 103 aa, Lawsonia intracellularis
  VARIANT (1)...(103): Xaa = Any Amino Acid
PDEIWRSVRALPDFWRLLQVRVASQXXXXXXXXXXXXXXXXNPDRAADPLAIARAFTVLFLPYSLLGPFAGALMDRWDRRLVLVGANVGRLVLIVAIGTILAV

SEQ ID NO: 104 - protein, 91 aa, Lawsonia intracellularis
WNEAYPEIDTIENNLQKIQSAGYKVLGHFVLPKSNWKENYYAPLQKNLERMKTTYNNDEKAQQVIALIQSEIDLYKENSDDYSYVFYIMKK

SEQ ID NO: 105 - protein, 108 aa, Lawsonia intracellularis
YTSPRGIGLEELERVLSAETFQPPPQTFKQEKILSHLKLIEGKHLVPLNTDEEEKTNPFAALFGPFLLREGKTRWQSNECNITIITDHFQAVSMQSAIFRSWILRYIQ

SEQ ID NO: 106 - protein, 103 aa, Lawsonia intracellularis
PDGRFDNGLKDIEDLLIVPNKTGAQKMAQILRGPMAGIYTRRHGRIEAEDHMGGLSIRQFKRGLSKAISRGLSTKGVGPPGAFCLIPGKSKPNLKRVSLYELI

SEQ ID NO: 107 - protein, 131 aa, Lawsonia intracellularis
  VARIANT (1)...(131): Xaa = Any Amino Acid
HGTIFTVSSTYDRHTLPIGAYAPAAITSTIGPIEEFPIGALVLAXXXXXGRGFIYPDGGKLRAIIKGEKAKTILLQTIEDQPSTYSSNGKKGVYIIEADPKAYNLLIENVLFDYMIVDAQQLIEKGKVTLL

SEQ ID NO: 108 - protein, 66 aa, Lawsonia intracellularis
FFEPSINSSQLKTIALPLGISFYTFQAMSYLIDVYRNEVPVSRNIINFGCYLTMFPQLVAGPIVRY

SEQ ID NO: 109 - protein, 163 aa, Lawsonia intracellularis
EWEHSVPAENFGRAFTEWREGHPLCVDNKGKSFKGRKCAEKVNKTYRYMQSDMYNLFPAVGSVNAARSNKQYSELLGVQSAFGTCEAKIDGNRFEPPDRAKGQVARAALYMDKEYKEYNLSRQQRRLFEAWSNMYPVDEWECTRAKRIESIQGNENIFVKNMC

SEQ ID NO: 110 - protein, 208 aa, Lawsonia intracellularis
  VARIANT (1)...(208): Xaa = Any Amino Acid
DVAFILLHGSPGEDGILQALLERVGCPYQGASPAGSXXXXXXXXXXXXFRREGLLTPKSVFLPLKPEVTWEPGLNYPIFVKSNIGGSSVNVHLVTNYEELFIAMEALFNAGEEVLLEEAIIGQEVTCGVIDDQALPPILIRSQGKFFDYYNKYAKNGAEEICPAPLEPHVLKHIQEYALRAHNTIKLQGCSRADLILRDDEVXFLLEV

SEQ ID NO: 111 - protein, 172 aa, Lawsonia intracellularis
  VARIANT (1)...(172): Xaa = Any Amino Acid
GGPYPLGLMKAFKDCAEGAADDLTRALLIFIDPADIKYIHTHGGSVLLGLAPYEIPEEIAAVLLHAHLHNIGILTKGSAXXXXXXXXXXXXXXXXXXXXRTVAIVDLDALTVKADEMLKDYLPGLCRYHERSALEPVVGGFLAHLPAQTGLISGICKGNEVLAVAIEDCSTE

SEQ ID NO: 112 - protein, 101 aa, Lawsonia intracellularis
GKSVQIFDLEVPTQRGFISVSVRLKGKDYNVDEVIGNFGGFPGDIVRIEDGREFSFKPRPQEQRTEMLSLIKSAEEDKMPAPRNKGGVFGTVKPITQYLAW

SEQ ID NO: 113 - protein, 196 aa, Lawsonia intracellularis
VDQDKKALAIAEMTLKPFKKRVHLVHTKYSSFPLILKALGWKLLDGALIDIGVSSLQLDNAERGFSFLYDGPLDMRMDQDANNNSLFEIVNKSRQEYLKDIISRYGEEPQANRIAKAIVQKRRTKPITTTKELADLIEQAYPAAWRAKSRHHPATKTFQAFRIVVNSELNELEKFLNMIMGWIAPGGRVAVISFTH

SEQ ID NO: 114 - protein, 154 aa, Lawsonia intracellularis
FYTRAAAEVGYSHAGLFTQNLYITLIEDKSLYKELRYALIAEKIKREYSREPSLLLRKIVQQTITSGGQRTTGSQLINLFARIIALPNVGEHEYFEADEAALFAKPLFPSMESLPILFRKERYIYGILTGDRALVTTVLAPRYDNLKTINPLDR

SEQ ID NO: 115 - protein, 117 aa, Lawsonia intracellularis
DHCRGILLVLEKGRPGNIYNFGGSAEQTNLAVVKEILHLLNKPNSLIHHVKDRPGHDRRYAMDFSKAAKELGYMPQITFNKGLAATVNWYLSHRDWVQNILSGDYKEFMNRWYKDRL

SEQ ID NO: 116 - protein, 164 aa, Lawsonia intracellularis
IRFIAYLQSFSNTYGPLSKFSSILAQIKGLQDVAGISVGTRPDCLTNKKLSLIVEMPYLEKWVEFGVQSLHDETLIKIKRGHSSKCSEQAIIQAANAGLQVCAHVMFGLPGETPTHMLQTIDRLNSLPIHGIKFHNVYVCKNTILEKEFNARNYYSITEADYSD

SEQ ID NO: 117 - protein, 163 aa, Lawsonia intracellularis
  VARIANT (1)...(163): Xaa = Any Amino Acid
FVGLLIDVKRIIERFQEFVVKGDTTSYLAKDDLARRVIHIINFLHGLGAATNCDDELASMFLSFQEDLEALISXXXXXXDWSKRELAKDVEAICEYVRKQSRETENMGEFSFDIPSRYHKKLLFFRLTEPLYAELIDRVIKFNGLSKSMKESNVXVLGNHMXI

SEQ ID NO: 118 - protein, 187 aa, Lawsonia intracellularis
YAITDDALSFNRSVIEVVKQLLDAGIRIIQYREKNKSSNSMLKDCITIKKLTEEANACFIVNDHVDIAVLCNADGVHLGQDDLPVDKVRELIGKEKIIGLSTHSPQQAQKAIEMGADYIGVGPLYPTKTKKDVCEPVTISYLDWVVSHIAIPFVAIGGIKQHNIQEVIQHGAKCWPLVLKILSAPNI

SEQ ID NO: 119 - protein, 138 aa, Lawsonia intracellularis
DYVIDVNLRGAFICMREAAKIMTKQRYGRIINVTSVVGQSGNAGQVNYAAAKAGLIGITKSAAKELASRNITVNAVAPGFIATDMTATLSDDVQKAYQESIPLKRLGTPEDIAEAILFLVSPGAGYITGQILAVNGVM

SEQ ID NO: 120 - protein, 179 aa, Lawsonia intracellularis
  VARIANT (1)...(179): Xaa = Any Amino Acid
EPLDTKERWVVWGMGLPALGFKHGSSNISKVRPLRFDWVLEPEIFPALFGGSAADVHIPIDWGKKKQLADLANSVEEVPEYQGTYTVGLTPVVGITNEDCRKIAEEPSMILRNKEMPIERLEIDWYRAFKHWCIQVPGCVLNPKDTSKGAKKRQARWRWKLAMGGLMAAESSGIASCXI

SEQ ID NO: 121 - protein, 92 aa, Lawsonia intracellularis
EEGGPIWRGSEKWLDAPQVMPMLIEEAGIRNMESRIISIAKNLTKLGLPLWTYIGSTLKRIMGARILLKHSLLEADGPAEKLTPIYCQSWRM

SEQ ID NO: 122 - protein, 141 aa, Lawsonia intracellularis
  VARIANT (1)...(141): Xaa = Any Amino Acid
LVSAXXXXXXXXXXXLMEAANKAAFEAGGRSIGLHIHLPHEEGCNNYLTIRTEYRYFFIRKLMFVKYAQAYVVMPGGMGTIDEFSEAFVLTQTKRIHPFPIILYNSQFWNGLVDWMRQTMSKEGFIEPSEIDALLNICDTT

SEQ ID NO: 123 - protein, 154 aa, Lawsonia intracellularis
DPHFVEFDSLKEGTGVYKVPVGTSSCISLAAGGRADGDMKTLIAGTLSLKKNFEEAVTVVDQGTMADAVFLIEQPHAVLKIDLLEQMLPEDIHLRGATDLLVVTYEKEKAEHLAANIIDLPKMAANSAFCPINLQTALTQLQEIVAPRYINVPV

SEQ ID NO: 124 - protein, 164 aa, Lawsonia intracellularis
ATFKQQLQEGKRTIDELLPEVFALVRETSFRVLGMRHFDVQLIGGISLHRGKIAEMKTGEGKTLMATLSGVLNALEGKGVHVVTVNDYLAQRDAEWMGALYSALGLTTGVVTSGLSDDARKEAYAADITYGTNNEFGFDFSRDNMKFYPNHLEQRGHFFALLNE

SEQ ID NO: 125 - DNA, 728 bp, Artificial Sequence
  synthetically generated sequence
  misc_feature (1)...(728): n = A,T,C or G
atcggccggtggaatcattggcattaagatcccttcggcacctactcccttcatcacacttgctataaatgagatccgtttataaagggtccttatccccaaagggcaccactaataaatgcctgaagtaacttctcgagcctttccaacacggatgaatacttcacgactatgcaaatgagcctcactaggaacttgttttcctgtatggaaatagcagtgccactaacgcggaatgaccttaaattatcttattagtttaatgccatataattagtatctgaagacgtataaatacgtttgcaaccgtttctagatacgacctgatccacaagaaagacttatcttgtaatattacatactgtgtggagaacagcgacttcgtaaacgaatttcagtacccctttcaacagcacagttgtatggtgccccctctgttacgacacgctctctttgttgagggacaactacaagcctattaatctcaaaatcgtgaggtaaccctaattgtgattcatagaaaggagccctcaaggnnttnnnnannnnnnggnnnnnnnnnnnnnnnnnnnctnnnanngnnnnncnnntnntncnnnnnnnnngannnnannntaggtttgcccaataccagtccgcctgtgctttcattgaagagcaggccaactgccttcaacaatgcaanctggcggttagtgccgacgggatctttcttacatttgcgattn

SEQ ID NO: 126 - DNA, 729 bp, Artificial Sequence
  synthetically generated sequence
  misc_feature (1)...(729): n = A,T,C or G
gtcggcactttggaccctatgcattaacgtttcttacgcacatattctagtcatcccacttcatataatgcataacgctttatgaagcctcttaaggcccaaaggtggccgtgtatacatacttgaagtaagaataccaatctttccagaagggattaataacccatgtctgagccattcagaagcaccacgcgcttcttttggtgtagggaaataacaccgctaccggcgcataaagacctgaaattactataattgattaatacagtaaaactagtattagaagattgatcgttacttttaaaagcgtttctaaataggccctgaacataaaaggagatttatttcgttatataaaagtttgtgagctgaacgtcgacctcgaagacgcttatcaataccaacgtcagcatcacttaagtaccgtgcctattctggtgctacaggctcattttcaagcgggacagctacgacgctataaatcacggtatcatgccgtaacagatattacgaaataacagcaggaaccctttaagannnnnnnnnnggnnnnnnnccnnnnnntannnnnngnnncgnnnnnnnnnnnnnnnaannnnnnnnnnnaannngnnnccacgcgcgcaaaattcgaattagccactgcttagattcgaaggccgaacaatcgccttcgatattggaanctgaacgtatgggccgacgggatctttcttacatttgcgattn

SEQ ID NO: 127 - DNA, 729 bp, Artificial Sequence
  synthetically generated sequence
  misc_feature (1)...(729): n = A,T,C or G
gtcagaaggttgaaccgcaggcactaaaattttttccgcacctatactattcagctcacttcttatactagatatcgtattatggagcgtcttcagccccaatggagaccatgcatatatacctgaagaaaatttaggaaacattccagcacgcatgaataattcgtgactcagcaatttagcatctccaggcccttcttttaatgtacggatagaacactgagacgaacgccaaatgacgtcaaattattattatagcttaatacagtaaaaaaagtatctcaaaatggaaggttagttttctaactgaatcttagtatgacctgaacaacaaccaagatttattttgttatattaattatagtggggtgcacgttgagctcaaaaacgttgttgcataccactttcaacggcactcttgaatcgtgaccattctggggctacaagctgtttttctagagggtcaactacgacgctatgaatcaccatattttgaagtaacctatatgctgatttaacagtaagaaacccttagggnnccnnnnnnnnnttnnnnnnnnannnnnnnannnnngcnnnnnnnnnnntnnnnnnannnnnnnnnnnngnnnnnnnntaggcttgcataattccaattagccagggcttctattgataggacgacgaatcgcccacaatattgcaaactcaagggaagggccgacgggatctttcttacatttgcgattn

SEQ ID NO: 128 - DNA, 729 bp, Artificial Sequence
  synthetically generated sequence
  misc_feature (1)...(729): n = A,T,C or G
gtcagcaggttgaaccataggccttaaaatttctaccgcacctattctattcatcgcactttttatagtagatatcgctccattaagcgtctttaaccccagtggtaaccatgtataactaccttaagtaagtttacgaaacattccagcacggattaataagtcctgactaatcaattcagcgtcaccacgcgctacttttgatgtcgggatataatactacgaccaaggcataatgacctcaaactattataatagtttaatacattaaaaatagtgtctgaaaacggattgttacttttcgaactgtctcttaatatgacttgaacaacagaaaagatctattttgttaaattaaatgttgtgaggtgcacgtcgagttcgaaaacgttttacaataccgcggtcaacaccacttttgaatcgtgcgcattctggtgttacaagctcattttgaagaggggcagctacgactccatgaataacaagatcttgacgtaaccaatattatcatttaacaggaagaacccctttaggnnannnnnnnnnnnnnnggnnnnnnnnnnnnnnnnnnnnntnnnnnnnnncnnnnntnnnnnnnnnnannnnngcnnnnttcgcttgcacaattccaatttgccagtgcttaaattgaaaggccgagaaatcgccttcaacattgcaacctgaaggaaagggccgacgggatctttcttacatttgcgattn

SEQ ID NO: 129 - DNA, 729 bp, Artificial Sequence
  synthetically generated sequence
  misc_feature (1)...(729): n = A,T,C or G
gtcagcaggttgaaacataggcattgaaatttcttccgcacctattctcttcatctctattcttataatagatatcgctttattaagcgtctttagccccaatggtaagcatgtataaatacctgaagtaagtttacgaatcattccagcccggattaataattcatgactaagtaattcagcatcaccaggcgcttattttaatgtaggaatataacactgcggccaacgcataatgacctcaacttattataatagtttaatacattaaaaatagtatctgaaaatggatagtaacttttcaaagtgtttcttaatatgacccgaacaacaaaaaagatttattttgttatattaaatattgtgaggtgaacgtcgtgctcgaaaacgttttacaataccacggggaacagcacttttgtatcgtgcccattctggtgctacaagctcttcttgaagagtttcagctacgactctatgaatcacaatatcttgacgtaacctaaattatgatttaacagcaacaaccccttaaggnnnnnnnnnnnnnnnnnnnnnnnannnnnnnngnnnnnnnnnngnnnnnnnnnnnnnnnnnnnnnnnnnncnnnnnnnntacgcttgcacaattccaatttgccactgcttatattgataggccgaccaatagccttcaacattccaanctgaaggtaagggccgacgggatctttcttacatttgcgattn

SEQ ID NO: 130 - DNA, 729 bp, Artificial Sequence
  synthetically generated sequence
  misc_feature (1)...(729): n = A,T,C or G
gtcagcaggttgaaccataggcattaaaatttcttccgcacctattctattcatctcacttcttataatagatatcgctttattaagcgtctttagccccaatggtaaccatgtataaatacctgaagtaagtttacgaatcattccagcacggattaataattcatgactaagcaattcagcatcaccaggcgcttcttttaatgtagggatataacactgcgaccaacgcataatgacctcaaattattataatagtttaatacaataaaaatagtatctgaaaatgcatagttacttttcaaactgtttcttaatatgacctgaacaacaaaaaagatttattttgttatattaaatattgtgaggtgaatgtcgagctcgaaaacgtttttcaataccacggtcaacggcacttttgtatcgtgcccattctggtgctacaagctctttttgaagagggtcagctacgactctatgaatcacaatatcttgacgtaacctatattaagatttaacagcaagaaccccttaaggnnnnnnnnnnnnnnnnnnnnnnnnnnnnnnnnnnnnnnnnnnnnnnnnnnnnnnnnnnnnnnnnnnnnnnnnnnnnnantacgcttgcacaattccaatttgccagtgcttatattgaaaggccgaccaatcgccttcaacattgcaanctgaaggtaagggccgacgggatctttcttacatttgcgattn

SEQ ID NO: 131 - DNA, 200 bp, Lawsonia intracellularis
aaaatgaaacacgagcaacatttattgtttctgaacaacagttagaatctattaaagcccttgcttattgggaacgattgtctatcaaagaacttattgcacatatgattgaatgttatttggaaacaaaaagtgaagttcttgaaactgctcttttatcatataggaagaaagtaacagtttctaacagcatagaaaaa

SEQ ID NO: 132 - DNA, 200 bp, Lawsonia intracellularis
gaataactggctttatttaggagtattatgtgcctcatcaggttatgtaaatatatggtacatagataagggaatatatttggctattagaaaacgtaatcttaaaagtaagaatgctatatcttatcaagtatattggaataatccatatacaggtctacgtgaagcaaaaacgtttccaacgttatttgaagctagtg

SEQ ID NO: 133 - DNA, 200 bp, Lawsonia intracellularis
cgtttgaatcattaattaagcataggttaaaatatgaaaagacattttttaagcctaaagaaaatactacgttagaacctgtaaccttatatgatgctgtgttatgttatcttcaaaagaaaaaatttactccccaatatacaaaaataatcagttgtagcttgcagtctatattaacatcctatggtgatgtaaaactt

SEQ ID NO: 134 - DNA, 200 bp, Lawsonia intracellularis
tctgagcttaaaacagatttttttgttcatttgaaaaattatcttgaaacaaaaacgaaaaagaatggtgaatgtttttcacgatcatatatacatatccaactatctcgtctaagaacaattttgaattgggcatatgaacaaggtatgcttgttatgcttcctaaaatgaaattaggagatccttattatactcggac

SEQ ID NO: 135 - DNA, 200 bp, Lawsonia intracellularis
tatccctcctacgtttgatgaaattacaaggcttatagcagtatcaccaccccatttagttaggataattatccttggtgcagcctttggtctaagagtaggaccaagtgaattgttttctttaacatgggataaaatagatttgaaaagtggtgtagtaaggataagcacaagtaaaaaaaatcctcgattcccttggc

SEQ ID NO: 136 - DNA, 200 bp, Lawsonia intracellularis
gtgaggtccctataaaagatgagttgaaaccttttttttctacttggtttgaagaagatactaaaaatggattgtcatatgttattacatataaaggtaaacccattcgttctatacatagttcttggtcaaaagcattaaaaaatgccggaataactcgtcggatacggccttatgatttacgtcatagttttgctagt

SEQ ID NO: 137 - DNA, 200 bp, Lawsonia intracellularis
gaacttatttcatctggtgtagatgtgggaactgttgcacaattattgaatcattcttctccaaatatgctgtttaaatattaccaatatgtggagactaaacagaagaaaagagctattgaactgcttccttcagtttcatgtgacattactatgtgacgctataaagagatgtctataactttgactataacatattg

SEQ ID NO: 138 - DNA, 200 bp, Lawsonia intracellularis
atttaatatgtgaaatttattgttatctattataagcaatagtctttacaagactattgcttataatagataacatagtcataggtattaactgttaaccaagtagtattaggtttatatttgtttcaatctgagaagactacatggtttaaggctttagctattagttatccaaagacttacgtttagtttctacatcc

SEQ ID NO: 139 - DNA, 200 bp, Lawsonia intracellularis
cagtgggctaatatatggatatctttttgttctaattgacgtagagttgtattatccgggacacgcactgtcatctgtgctatagcctcaatcattgataattctcctggcgtgatgtttggagctataaaaatacctttatctggggctataagaaattttggtgttatattatattgagattcaaatcgtgctatagt

SEQ ID NO: 140 - DNA, 200 bp, Lawsonia intracellularis
aacacttattttttcattaggctgtatttctgcagtgattgccccaagatatacaacgtgatcaggataaaggggattcccacggcatatttttaatcccattggagtaagggctaacatatgtagtatagagtattaactggaatagtccagttgctatcgttaatctttataagatgaaatatatttggttgaattaa

SEQ ID NO: 141 - DNA, 200 bp, Lawsonia intracellularis
tggttttacaggtaaatgaagacgttttgttatttcatttaataatgaaataatatgttgatgactatctccagtaagaattattccatgattctgtaataaaaatatatttgtttttgtagaagatacttgttctgataaataatgacttaaagataaccctggttttatataaggaaccattatccaagatagaccat

SEQ ID NO: 142 - DNA, 200 bp, Lawsonia intracellularis
ggagtttttttgctagatgagtatgtccatctggaagaatagaatggataatagcatcaatcatatgtaaatgaacaactagtttttgtggtagaatagcatgtattggtgtttctatagatggaagtaaagaagtttcgccataaacaagatcagaaagagattctattcctgtttttactctttcaagtacggagggt

SEQ ID NO: 143 - DNA, 200 bp, Lawsonia intracellularis
agtgatagggaaagaaaaatgtttttttttcattgcttgagaaagccatagtccagaagctttaatccataattgttccctttctttaagagatatatttcctcctgctccttgtgtaagtaacggattagagccaagtaaagcacttagaagatttatttgagaaagagaagatatcggaagcatggtttactttatta

SEQ ID NO: 144 - DNA, 200 bp, Lawsonia intracellularis
tgtatgtgatgttgtcgtgtttatttttatagataaaggaagaatccaagctataaatgtagggaatactataaaagtaaataacatgagatctgtaaagtatgagctcactaaaaagggagcaagcatggagatggatataaatttacaaatagggtctaaaaagagacaaaagaattctccaatatgtctccatgtac

SEQ ID NO: 145 - DNA, 200 bp, Lawsonia intracellularis
ctattttatatcttgagttttttggtgtaaaaaaggatataaagagatatttatgcatggtaaaagtttttcttcttcctcaagagtaagcatcttttattcagaagatagccaaagtttccaaagacacataacattacataacttaatacagttagaccatctagattaaaatgttcaaaggtacatgatatagccta

SEQ ID NO: 146 - DNA, 200 bp, Lawsonia intracellularis
tcatatataggacctttattatgaggtgctatttctataatttctcctttatagataaggtagaatttgataattgttcctggtggttacaaataaaaaacatcttttctcctgctaagctacttaagtttcaccataggggtattaaaattttaataagtggttttaatatgtataacctaattgttgaaaacgtttcc

SEQ ID NO: 147 - DNA, 200 bp, Lawsonia intracellularis
taactcctgacatggagataataggttgaaatttcatggttccttttttctctataaataaaaatgagctaaccacctatcaatggtaggtagtaacaaatgggttttgttaccttttcattttttattttaatctatttaatttttaaaaataaatctcctgtaggatctattaggatacgttcatatcctagcaaagt

SEQ ID NO: 148 - DNA, 200 bp, Lawsonia intracellularis
taagttgttataaagtctttgagagttttttattactatagcattaggtgagacatcttttacccaatttataaagaagatctgttcttcttttgtaggattttctaaattaagaaaagcagcaatattaggatcgtataacttaatgtattcatctagtgcaactaagtatctatttgtaaggacatgatatcttttct

SEQ ID NO: 149 - DNA, 200 bp, Lawsonia intracellularis
taaatgtcgttaaccaacatgaaagatcataaggggctataattgtttgacctgaagtgagatttttatcaatagttgaaagtactttttcataaatatgtgggtaccatagtctgtcaaaacccattctctcaaaatttgaggatcttaagtttgaaagcgacagcatactaatagtaaaaaaacataacaaaatacac

SEQ ID NO: 150 - DNA, 200 bp, Lawsonia intracellularis
tgtataaagtttttatttccctgtttaaagatagatacaatatatgttgcactaagtaatgtcagaccatatagccctatacatgcaataccccatattgggattgtccataattctctccaacaaatataaggagttactcctatttttaatatctgcatacaataaggatttagtggtattaaaaaatacaataaggt

SEQ ID NO: 151 - DNA, 200 bp, Lawsonia intracellularis
aagtaataagaaataatattttttcttttgattttttatatataaccagcttgttaaaataaaaaataatagtataaatttttgtatagtaccaaatacaaattgaacagtatcttcagttactactggaataacataactgttttttataggagaaataatagttataaaaaaggttataatccaaaatccataataac

SEQ ID NO: 152 - DNA, 200 bp, Lawsonia intracellularis
acattataggagaaataaggtaacacatgttacgtatagaaataaaagaataagcacatattaaactaaaaccaataatctgtgggacaataaagattgctgaagaagtacatccaaatgcagcaacagaaagaagaaagacatttaaaatgtctttcttctttttatcgttaataaaatcccaaatagaactatagata

SEQ ID NO: 153 - DNA, 200 bp, Lawsonia intracellularis
agaggtacaattatacttacaaatatagcctttccctggaaaaatcttacaaaggtaaagtttccgaaagatgcatgactttcagctaataagaaactgagtagtaaaaaaggaaagaatattactcgtggtgttattccaaagtgaaggaagaaacgtgaccaagctaacggatatagtatggaagatattgttgcaag

SEQ ID NO: 154 - DNA, 200 bp, Lawsonia intracellularis
gatgtaatgagagactttagcaggttgtaagtttgttaaagtagacaatacagcagaaagaacattaaatgattcaaactgataaggccaaattttaaatggtatatcgtgaaataatggatctgtctgaaaaagctgttcatgtggtaagtttattaagtgaactgctatagcaacaaaaagtgcatcatcagcatctg

SEQ ID NO: 155 - DNA, 200 bp, Lawsonia intracellularis
ttcttttaatacaaattgttaataatgcatataaaaaagatagtaaaaagatagcaaaaagatctttccagactatttttatttttaaagtagatacagggatatttttttcttgttgttttttgtaaaatagacttacaagtaaaaaaataacacataatatccatgtcaagagatagcttttactgaaaaagtatata

SEQ ID NO: 156 - DNA, 200 bp, Lawsonia intracellularis
aacatgataatacatgctatactaatcattatagatatgtatttattttcatcttgaataaaattattagtagtatctgtatgttgttttatttgtataaaaatattattaaatttataataacaaaaataaattagagtagaaaaaatagataaaggaaaacctagataacaaaattgtataaatgtagctctacaaaa

SEQ ID NO: 157 - DNA, 200 bp, Lawsonia intracellularis
taaaaaaatatgatagtatattgtaaaaaaagaaaagaagataagacagtatgatggaaagtgaatacataaagaaaagatacggtttattttcataggtcacatttattagtattagtttatataaaaattcccttaagaagagggaagaaatatataaactaatactagctatataactatttaattttcttaaataa

SEQ ID NO: 158 - DNA, 200 bp, Lawsonia intracellularis
atttaacgaatataaaattatatgcaatctccatttaaaacaatttttatatcttaagtgtattatctaactaatttagaaatattaatattagtattaatttatagttattattaccaataaatattttataattttatttgactaaaaggaattaaaaatttttacgttaccaaagttacaactgtcttaatgaaaat

SEQ ID NO: 159 - DNA, 200 bp, Lawsonia intracellularis
atttcttcaatatatatctatagtatgatattcatcatttttaacattctactataactagatattagttcttctataaaaagaaaggaagttgccataataattttttatagtacaaaaattgtaaaattaactcttcttaattattgctacaaaataatcttcaaaacacttttgagtaaaaacaataggttctaaca

SEQ ID NO: 160 - DNA, 200 bp, Lawsonia intracellularis
aaatagaactaatgctttatttttctatttcagaattatttttgctataaatattcggtataactaaacacattaataagataaaaaaagaagtataccaagtaactgtatatcgtaagtggataaatataggattattacatgaaaaaattattgctgttgatagcggtgtgatagcaaaaaatatagcagattctttt

SEQ ID NO: 161 - DNA, 200 bp, Lawsonia intracellularis
tgcaaaaatatgttttttctttttaacaaaagaaaagatagtatgagtaaagaaagtataaagatacaccaagctatttgccaataatataaagttgtgttttttgcatacatctccattctagtatatgtccaatcttgtattctataaaaccatgaaagaggtatgtcagaaaatccttgttctttagtgcctttgaa

SEQ ID NO: 162 - DNA, 200 bp, Lawsonia intracellularis
attgtaatataaataaagtggggataaactataatgaagtattcccatgggatacctataacatatagacatccaatcattttttagtattgtacgaataatatctttatatacctctttacctaatggatcaatataagttcttatttgataaaaataatttgcttgagtgtcatatttagttacttcttctattggaa

SEQ ID NO: 163 - DNA, 200 bp, Lawsonia intracellularis
gggtatttttaatatattgtggtaaattagggtaaatattttgcaagtagggccagcttaaggagcaagttatcatatgataacgatgaaagttatagtttaaagtaaatgtatcatttgttgaaggaagaaaatattttgtaattaaattacctgtaataccaaaaaaaaagacataatataagaggaacgaatttaag

SEQ ID NO: 164 - DNA, 200 bp, Lawsonia intracellularis
tcgacggattgaaggtttaataaatagatatataatgatactagtcataataatacctaataacatactaaaaaaacgtttcccacgtgtattggaggcaaagataaaagatataataaataggataaaaatagatgtgttatatatatatataactattagtaggatactgtttttttgtacaaaattcccataaaaaa

SEQ ID NO: 165 - DNA, 200 bp, Lawsonia intracellularis
tagagagctaataaagtacatgacattgaagggattcaggtacaatagaatgattaaaatgcatgataagtgggtttgttcctactaagatagtaataattccacgacttttttttgaaacatttggtaataatgcaccagaaataaaccatatacttatgaaagtaagagttgtttgaatactaaacaaaataggagga

SEQ ID NO: 166 - DNA, 200 bp, Lawsonia intracellularis
aaatatgttttacctcctatttcttgagaaaaacaaattaataaaggtaaagtaaatggtcgaatattatgtatgactaatggattacttcgtaagatataatcttctgaatccccataggagggaataagaccccagttgttacttatccattttatagatattaccaattgtaatataaaaagaatagagaaaaaaat

SEQ ID NO: 167 - DNA, 200 bp, Lawsonia intracellularis
ttgaatatatattttaaaggatttttttctaattatttttaccatagattattagctagaatatagttcaaagttaaaagtttagtataattatatcattgctggtaaactatagtcgttccaacttgttcaaaagtaaactctatttcacgcaactcagataatgctcgtcttacacgattatgattttcttcttgaac

SEQ ID NO: 168 - DNA, 200 bp, Lawsonia intracellularis
atagaaaagaagaaatccgccacctccagcaccaaggagcttccctccaatagcgcctgcatcaagagcttttttataccaattatctattttttcatttgttactcctgaagccagttgccgtttaagctcccaattttcatgaagaatttctcccatcatattgatattattgtttaatagtgctttacgtaattcaa

SEQ ID NO: 169 - DNA, 200 bp, Lawsonia intracellularis
aagcaaggttaaccatctgggaaagaatcttactaatttgtactttattcacggtattgtctttttgctcagcaagaatttccattgctgcacgagtggttcctgtgtaaaaaagtaaaagatttttttgtagtcgttcttttccttctctacataaacaaagtttttctacagtaacagattcatctggatgaaattga

SEQ ID NO: 170 - DNA, 200 bp, Lawsonia intracellularis
ataaaattaagaccaccaacagcacaagcatattggtcttgttttccaataggatctcctagtttattgatttcaacatcacaggcatatgctgctaatccttcacgactaatatatcgtccttctgtataagtattacaaagaagagcaagaccaacagtaaatgctgaagaagagcctagtccagttcctgatgggat

SEQ ID NO: 171 - DNA, 200 bp, Lawsonia intracellularis
atcagcacatgagttaaaatctactccctttacattaaaatctttaaaaacttgatgcaggatagggtgttggatttctttaatagttgagacatgttcattacgtgtatatttaagtaaatatccattttgatggaaatatgggtatatggaaagatatacatatttattaatacttgtgctaacaacagcaccaccat

SEQ ID NO: 172 - DNA, 200 bp, Lawsonia intracellularis
gtttgagatagtatgcagggagatcactacctcccccagcaaaactaattcgtaatggtgtacgtgtaataatcataataattccttttggaatgtatttagactattttaaaataatatcaatagcttctgataaagagtctgcttgtaggttatactgatatgaagggatagaagttgaaacagcaccaataaatgct

SEQ ID NO: 173 - DNA, 200 bp, Lawsonia intracellularis
gtgttacacttagcagctttacctgctatcatatcgactatgttgtctcctatcatccaagattgttccatattaatattaaattgtttcatagcactaaaaaataaacctggttgtggtttcctacagttacatactgtttttaattcttgacgttctcctacaaaacctttctcaggataatgaggacagtagaaaat

SEQ ID NO: 174 - DNA, 200 bp, Lawsonia intracellularis
tgcatctaagtatgctccctcattacctaataatgtttccatatatgcatgtagagcttcaagagcttcttcactaaaaaaaccttttgcaatacctggttggttagtaatgatgatagccaacttaccactttgattaattttcctaatagattttgtaacaccagggagtaacataaattgtgttttatcaatactat

SEQ ID NO: 175 - DNA, 200 bp, Lawsonia intracellularis
tgttcatattagtacaaacaacaccatctctatctaaaaaaatagcaggacgagcattatcttggtgtaattttgtaacttttccacatataacatcataagaaacttgctttaaacgttcttttgttcccatatctttaatatattctgcagtcttataggcagaaaataagttaccgctttcttgttgaacaatatat

SEQ ID NO: 176 - DNA, 200 bp, Lawsonia intracellularis
ggaaatatatctttaccaaaatctgaatatgaatctgaagggatatgattaaaaatgagaggatcaaggatatatacccctgcattaacaatattttgatagaaaaaattttttggatgaggtttagggaaaaatcctataatagtattatttaaatctactttaataatatcactatcatgaggatgatcattaggatg

SEQ ID NO: 177 - DNA, 200 bp, Lawsonia intracellularis
aacgacaattgtgccatataaagaagggtgtgtttcatcaaattttattaatttatggagattaaagttcatgacgatatctccataaaaaactagaaatcgactttgtaaaaaaggttgtgctagtttaacacttccagatgttcctagtggaaatggctcttttatatgtgtaatgtcaacgtcaaaacgactaccat

SEQ ID NO: 178 - DNA, 200 bp, Lawsonia intracellularis
caccaaaatattcttggatatgacatgaaagtctaccagaaagaataaaaaatttttttataccatattgtttagcaaaaaaaatctgacgttctaagagagggactccattaataggaatcattgatttaggaatagttggtacccctaaacgagtagcattaccaccagcaatgattacacagtccataagttttttt

SEQ ID NO: 179 - DNA, 200 bp, Lawsonia intracellularis
tactaccattttatatctatacgaagtctttttattaatccattatatatagatatgaacatattaaaagaattaaatatataaagccattttagacaatacactcccaagctacgaattgtaattttttttccttgtcgatatgaaatattcctccaaccactaaacgatgtatctaaaaattgttttacttcgctaat

SEQ ID NO: 180 - DNA, 200 bp, Lawsonia intracellularis
aaattgttttagagggatagttgtttctgctatacgatgaacatctgctatccctacatgtataaacgcggctaaagttaataatggttcatagataggaagtatcccagcttgttcaaaatctttttttaagtttataagatcattcctaaaggttatagttttttttatagaggcgtttgttacagcagaatgttcat

SEQ ID NO: 181 - DNA, 200 bp, Lawsonia intracellularis
gagtaacataatgataaagtatttgtgggagaataacatatcgtttaatttttggagccaaagataaaaagaaaatacaatcttcataggcagatataggattttcagggaatcgagaatcacctattattgatcgtttaaaaatttttccccaaggggcagggaatatataagctaatgtatttatattttgaggggtt

SEQ ID NO: 182 - DNA, 200 bp, Lawsonia intracellularis
acttgaaaaattgtttgactgaatttcatcatttcttttgaaaagatatgccctgatactgaaatacggtcaaacccacaacaaataaagtcagcatcaaatttaatcaacgaactaagcatgatttgtaaaatattttgttctacataatcatctgcgtcacaaaacataatataattcccttttgatagggaaatacc

SEQ ID NO: 183 - DNA, 200 bp, Lawsonia intracellularis
aaggtttcttgctcctccttgtccacgacctttttgaagaacaaattgtatttgttctggataacgatttacatattcttttattacattatgacattcatctttgacattatctccgacacaaatgatttcaaaatttttatatgtttgtgatagaaatgaatctaggcaacgagcaatatcctgagatttataaacag

SEQ ID NO: 184 - DNA, 200 bp, Lawsonia intracellularis
gaataataacactaatttccatagcttatttaaactttatttattacttagttaccgttttgccataaacgatattgtgttaataatcggaagcttatctagtttcatttttctataaacagtattaatagttttaaacccatttaaaaatactggagaatcatatgtaatttgatagtgttttgttaatgcttgtaatg

SEQ ID NO: 185 - DNA, 200 bp, Lawsonia intracellularis
tgagctggatatttctttttgaaagtttaaataaatgtttttcatattcccaagctctggctgctgttgtatgaagtatatctggaagatcgtatctgtgagcttcactaacaaaaataagtatccccccccccccctctggttatcttattgtaatttaaagcattaaataaatgtttaataaaatcaaatggttttga

SEQ ID NO: 186 - DNA, 200 bp, Lawsonia intracellularis
aatatgatgtaatacagatgcaccatatattacatcaaatttttcatctataggaaaaagttcattagtaataagtctacagtcaaacccttgtttaaccatattatcaacacatgactgtctaacttcaacgcctataaactttgccttaggatattttttttgcaagcttttaaaaagtaaaccatcattaaaaccaa

SEQ ID NO: 187 - DNA, 200 bp, Lawsonia intracellularis
tctctaaaaaagacatattacttgtcacagtaaaatttgagtctatatattcaataatttgattatacttagtcaacaatatattttttttataatttttagtatgaataatatattcatattttttagtatcatctgattggatatcgatatttttcatttttatagttattatatctattacactttttttatcataa

SEQ ID NO: 188 - DNA, 200 bp, Lawsonia intracellularis
aagataaatttcctagaaaagaaatatgatgtaatttcattttacgatatatattatcaagagacttaaaccctgttatacaaacaggaggattagaatcaataacatattcgtttgttaatgcttgtaatgcattttttattttatttttagatatcttaaataattgtttttcatacttccaggttcttacaagagtt

SEQ ID NO: 189 - DNA, 200 bp, Lawsonia intracellularis
gtatgtaatatactgactaaatcatacctatgagcttcattaacaaatgtaataattttgtccccctcccccccattagaaggctttagaagatcattatataaatatgttataaaatcaaagggtcttgaaatatgatgtaatacagatgtaccatatattacatcaaatttttcatctatagaaaaaaactcatcagt

SEQ ID NO: 190 - DNA, 200 bp, Lawsonia intracellularis
aataagtcggcagtcaaacccttgtttaaccatattatcaacacatgattgtctaacttcaacgcctataaactttgctttaggatattttttttgtaaacttttaaaaagtaaaccatcattaaaaccgatttctaaaaaagtcttattttctgatgatgttattccactatctatatatgtactaacttgtctgactt

SEQ ID NO: 191 - DNA, 200 bp, Lawsonia intracellularis
tatcagcaaatatatttgctttatattgtctattttttaaaagacattcatatgttgcatcttcctgagattgaatttcaatattcttcataggaggtattatgttttttcttttgttaaaaattatatttctttttgaaaaaggccatagaaatgatctccaaaatatttttttgtagtaaagtaacgtacaaaaaaat

SEQ ID NO: 192 - DNA, 200 bp, Lawsonia intracellularis
aagcaacttgatgaagtattttcatcctagtactcatgacatttttttgagcattattatatgccacaggaaaccatttacaaatatctctataaagaggagaaatgagagggaatccagcatacaatgttgtaataggtttaacaccaagagtttctaaaaaagattctacttcttttttcttaaagttgcgaacatgt

SEQ ID NO: 193 - DNA, 200 bp, Lawsonia intracellularis
ccaataagtttttcataacttctcatcttacctgtaggaaaagaaagtaaaaggtacttatttgtttttgcaactaaagaggttagcaaactttgccaatcatctacatgttctaacacttcaaaagcagaaataagatcaaacattccaaaattatcttttgttatatctccaacacgaaatgttagattttttttgtt

SEQ ID NO: 194 - DNA, 200 bp, Lawsonia intracellularis
atgtaccttattagccacttctattccattctctgctaaatcaaaaccatggacataagcattaggaaaaaaatttgctagtgttactgtgtggatacctattccacatccatagtctgctatttcatatatatatatatgattacagtatttttgtaatatacttacaattctatccgtatgatacctgaacataaaac

SEQ ID NO: 195 - DNA, 200 bp, Lawsonia intracellularis
tatgtgttagataatggatagcaccttctgtccactttgtttcataaaaatttttattataatctgtaatcgtcatattcatttttgttaactaacttatagaaaactaaaactatattaattagaagagaacagtcataactattatttttttttaattattacaactaaatattcaacataaataaatataaaaaaga

SEQ ID NO: 196 - DNA, 200 bp, Lawsonia intracellularis
taaaggttgtaccaatatctttttaaataaatatatattatatattgaagtagcagctatgaataaagtatattgtaattagttagccttttcaaaaagaccaataaattgatctccaaaatatttttttgttgaacaacaggatgcaagaaaatacataacatggtgaagaagttctacttttctactcataatattat

SEQ ID NO: 197 - DNA, 200 bp, Lawsonia intracellularis
aatacgctttttcatatgtatttgaaagccatccacatgcttctcgataaataggtgaaaaaaatgggaatccagcatataaaactaataggggtttaacaccaagagtttctaaaaaggattctacttcttttcttttgaaattacgtaaatgtcctcccattttttcatactttctcattctccctacaggaaaggaa

SEQ ID NO: 198 - DNA, 200 bp, Lawsonia intracellularis
aacaataaatacttccttgagttgttaacaaatttttcaaggagtagtttccagtcttcaatatgttctaatacttcaaatgcactaataagatcaaaagttccaaaatcttcattagttacatctttagtatgaaaactaagattacttcttttattatatttattagcaatcgctatcccttgctcagaaaaatcaaa

SEQ ID NO: 199 - DNA, 200 bp, Lawsonia intracellularis
cccataaacttgagcattggggaaacactttgcgagtgttactgtatgtaaacctaaaccacacccacagtcagctattctatatatatatatattcaaagcattcttatagtgtgttaatatgtaatttataaggaatgattgataacggtgtataaaactttttttcatatattgtagagtttctggtttccatcttt

SEQ ID NO: 200 - DNA, 200 bp, Lawsonia intracellularis
cagcatatatcatcttattatcaatcatttctttgacctttctatttcctgaatcaaggattacatatttaataaagtttaagtaattatttataaacaaatataacaaatatagatcaactaactttatgatatttgttcattttttattattttctatttttttggacaagagatctatataccctctttaagtcaat

SEQ ID NO: 201 - DNA, 200 bp, Lawsonia intracellularis
aaggttattcgcataataaccaaaatatccccatttacttatagcaaaaaggtatgctctaacaataagacgttcaatcttacgagataaactttttgaatatggccaatacgaaaggattttttcaccatataatctgttaatatccgaagcacgatatttattaataacagaataaaaataatccatcttatattgtt

SEQ ID NO: 202 - DNA, 200 bp, Lawsonia intracellularis
tacattcaatacaggcttttggttttttctttaattctatgagatcctttaaagaataatcaaatattgatcctaataatgcatgttcaacaaattgattaaccacacagcaaacaacaacatttgcattttcatcgagcataagaactcgttcatgttcacaccaataatttgaaggagaagaattaagaattttattt

SEQ ID NO: 203 - DNA, 200 bp, Lawsonia intracellularis
aactgtttttcatcatgaagaaaaagatcttttgaaatcctttcctttgtatttagatcaattttacctgaaagaaaatctttaaaaactctataatctacaacatatgctaagtaatcatgtaaaatcattccatgttcattagcaaaggcttctgcgtccttaagctgctcaaagttatatatatatatatgaaatac

SEQ ID NO: 204 - DNA, 200 bp, Lawsonia intracellularis
aagaagggcttctccgacaaaaccacatcttcttaactctgtcagtagccggacaatattctgttttgtcttctcaaaactaaatccatgtgctgctttatagcattcatcagaaaaccctggcatagaaaatataattctatcaagattttttaataatgtagtatcgttaaaggaagctcttacagatccatttgaac

SEQ ID NO: 205 - DNA, 200 bp, Lawsonia intracellularis
taagtgtataatgtaaacctaaagaattcattacatcaaaaatgtcactaagattaggatgcaaaaatggttcacctttattaaaaagatcaactattgtatttttatttataattccttcattaagcatatatgttaaagttttatgcagaaactctggtgtaagaggcgtttgatttgaaggttcatgaaaaagattt

SEQ ID NO: 206 - DNA, 200 bp, Lawsonia intracellularis
gctctacctgtaggacaataataacatattgcattacaacgtggggtaacttcaaaaattaaatttgaataaggcttcataactcataccagtttttataagttaattttgtaactatttataattcaataataaagtagattataactactatgagttatctttaatgtaaagattgtcttattataataagatataga

SEQ ID NO: 207 - DNA, 200 bp, Lawsonia intracellularis
tagataactctatctaaagtagagtaaaaatttttttctatctataagagaacttattgggataattgtattattaaagaagtaaaattaagaaattttttcaaaaaatccaataaagtcaccaccaattttttttgaacaacattttgtataaaaaaaatacattatatcgtatactctttttaaaaagaaagaaggct

SEQ ID NO: 208 - DNA, 200 bp, Lawsonia intracellularis
tttttgccatagtattatggattgttccacgttgtaactcaattgctatttttgtaataggataataaaatgggaatccccaataaaaagcattgagtagtttatatccagaagctaacatatattcttttatttcatattttttaaaatgtctaaaatgttctcttaaatcatttttatacattttccctattggtaca

SEQ ID NO: 209 - DNA, 200 bp, Lawsonia intracellularis
aatataatgatatattttatattagattgaacccaataatctataacagactcccatacttgtatatgctcaagaacataaaaagaaacaagtaggtcatatggtgttgttagataataactactattaatgtcacaatattcaaatgttacttgctcaggatcttcccccccccccctcccatacaaacgggaggcata

SEQ ID NO: 210 - DNA, 200 bp, Lawsonia intracellularis
attaataccttcttttgaaaaatcaacaccctttattttagcattaggaaaaatttttattaaattgtatgtctttgacccatcaccacaaccaacatcaacaatacttttgatttgggacacatcaaaattacataacaatttttttaaaaggtataaaatatacctagcagcaaggctatctcttttatcccatgaat

SEQ ID NO: 211 - DNA, 200 bp, Lawsonia intracellularis
gttgagaataaaatgaattatatattttttggttattattgggacaatcttcttttaacatttatctctctttctttttaaacttagtatcttttttataaagataattcctgactttatactacgtaatccttcttcagggtcatggattgcttgtttaagtttcatcaaaatatatgctggtcgtaaatgatatttac

SEQ ID NO: 212 - DNA, 200 bp, Lawsonia intracellularis
gcagattctgattacataaatcaaccaattcttgacctgtaaatatatcagtatctatcacacaattatgactaccatcttctgtaagccattgagaaaaatcctctgtcttcaaataaccattttcttttgcccaagtatatgcttctgtccctggataaacatatagtggataaaattgcatagaatcacagttaatt

SEQ ID NO: 213 - DNA, 200 bp, Lawsonia intracellularis
ttaagagcaaaacgataattttctttttgtacttctagggaatctcctggtgttccagccataatgcaaccatgtaccataattcctgctttttgggcatctttagcaaactggtaataatttttgatcttttcgtttttatgcatttgatcaagtgcagactgaactccactttcaaaaccaacagttactaaacgaca

SEQ ID NO: 214 - DNA, 200 bp, Lawsonia intracellularis
acctgcctttttcataagaaaaagtgtttcataatctacatctccacggacattacaataccatgtcatattaagtttttcttcaataagtaactgacaaattttccttactcttgcagtattaacagtaaaacaatcatcttcaattccaatctctttaagatcagggaaattttctttaatatatttaaattcagcta

SEQ ID NO: 215 - DNA, 200 bp, Lawsonia intracellularis
caatattttcaggagaacgaggtcgataacgtcgactgtgaaatacttgagggtataaacaaaagaagcatttaaatggacagcccctacctgtgataatcataaccatagggtattttgcagctgcaaaaaaataatttttgtaatttaaatattttttataaacagacgtaacaaaaggaagggaatcaagatcttca

SEQ ID NO: 216 - DNA, 200 bp, Lawsonia intracellularis
atcttttctctttcagctgtttttatatattcttcattatgacgaaaaactagaccagggacattatgtaaagacaacttttgttctaaagcatgtgctatatcacgaattgtaaaatcatactctccaatagttactgcatcaatacttttcgaaagattaagtgtatcctctggcagtgctgaaggatgtgtcccaac

SEQ ID NO: 217 - DNA, 200 bp, Lawsonia intracellularis
aagaataacaaaacaatgagggaaacgtcttttgatttcatctcctactttaacatcactataaatagaagcagtactagtatccaatacagctatatctgggataaaatcttctagtaaagtaaaaatatcttgtaattctaaattatcagcaggagcatctataaatcttacatcatgcccattttgctctgctacac

SEQ ID NO: 218 - DNA, 200 bp, Lawsonia intracellularis
cgacagcatatgctaaccaaaatggataataaagtgttcccccttttgttatagctggactacgtgatgtacgagaaaaccgacctttaaacggaggatttaaaaaaaagattttcacaatagactcttttaattttaaggttagtaatcttctattttaaaagaaaaataagaccaataaaaacaaaaagaactccaac

SEQ ID NO: 219 - DNA, 200 bp, Lawsonia intracellularis
tcctctagtaattgatagtgtttcatgtaaaaaaaataatccgccaccaataatcattaaatatactaaaggaacgtataaagaaaaactttcagtaataccatattttgttaataataaagcaaaaaatacacctgctatccaacttagaatcatccctaaaatccataagtaaccgctggttactatatagcaaatcc

SEQ ID NO: 220 - DNA, 200 bp, Lawsonia intracellularis
cctgtgtaaagtctaaattttttcctccatatctcatcaaaagtgtaccagttgctgcaataatcccattaagtagtagatataattttatatttatattcatcatattagctaagatttgacctggatagaatccatccaatgatgaagaataattgcatgacaagactcacattctccatatgcatttgttggaacat

SEQ ID NO: 221 - DNA, 200 bp, Lawsonia intracellularis
aaaaatttaaatctccgagttgtcgaacagtattactaaaatgtttaccagttaaacttacacaaaaaatttgtttttcttgcatagattgtgctagacggattgtattaacaacattaggtgattcaccagaacaactaattacaacaagcatatccccagaacaaacatctcgtgcaaaaggcactgaaaaaacatat

SEQ ID NO: 222 - DNA, 200 bp, Lawsonia intracellularis
tcgaaccctaaatcatttccaatagctgttaaaagcgataagtctgtaaaaacttttgtatttatttgagcattcttagttaaatcagctgaaaaatgactagccatagacgcagaagcgccattgcctataaaaaagactgtcctgttagtattacgtaattcttctgttttttgtacccaatgtataaaaccatcttc

SEQ ID NO: 223 - DNA, 200 bp, Lawsonia intracellularis
taatgaaagggagttacctccagaaatactcacttctacagaagtcaaaagctttgatattctttgaacataattattccatgatatttgcatatacttcctaattaaatctattacacatgttcatcttttctttttaaagaatcctcaagttcttgaatacgcaattttaaaaaagtaacttcttgcataagaagctt

SEQ ID NO: 224 - DNA, 200 bp, Lawsonia intracellularis
tttatgtctccaaccatgggaaacacttacagaaagctgaagacaaataagcataaataaaaaaagagtaaacattattaaagtaactgttggggagggaaaagaaatatgtatccataaccattccgcaatattataaagaaaaggaatacaaaaaatacttattgttatacagaaccataataatgcgtaacgttcac

SEQ ID NO: 225 - DNA, 200 bp, Lawsonia intracellularis
gtaacataccatttttaattaacgaaaataacgtaaagaaaaatataattcctaaaaggaaaacaatagttatatgtaatagtggcataataacttctttttattatataactatatatggctatagtataggaaagtatatttatatatttttgctatacttattatttattaatatactgctttgtcgtcttactagt

SEQ ID NO: 226 - DNA, 200 bp, Lawsonia intracellularis
tcagtaatgataacatcatatctagaaaactttgcatgaattaataatagtaataaaaaatttattataacaaaaaagtataataataagtctgtaccacgtccaataccaacagctttagcaacaacagttgttacttcaggctctaccacaaaaaacattcctaacaaagacaatatcatcataaaataagataataa

SEQ ID NO: 227 - DNA, 200 bp, Lawsonia intracellularis
tgatgtatagttttttcgtatagcaatggaacataagaaaacaaaaaacatacaaataaaaaggataaaagacataatcatttgttaagactccatataaaaagttcttttactatattaaaagaattttttaacttttgcccctttgaaatggcatattctgtatataaaatagttacaggaatttctttatatctaag

SEQ ID NO: 228 - DNA, 200 bp, Lawsonia intracellularis
acgatgtttctttatattattaataatttcagaggcatgagacattctgttttgctttattgaaatcacttttaatgctttttttgatagtgctcttagtccattatgtgcatctgtaacttttacccctgtagtcatcctaacaaatattgttgctaatcgtagccatatttttttcgacaatggcatattaaaagatt

SEQ ID NO: 229 - DNA, 200 bp, Lawsonia intracellularis
tagtacctaaaaatctacttccacaaactatatcagcttggtcagcagcaataacttcaaccatttttaatgcatcttcaattcgatgttgtccatccgcatcaaaagtaataacaatatctgcaccctcttttaaagcaaagttaaatcctgtctgtaatgctgcaccttgacctaaattcattggatgtctaataact

SEQ ID NO: 230 - DNA, 200 bp, Lawsonia intracellularis
attgcaccactttcaaatgctaattttgctgtttcgtcttctgaatggtcatcaacaacaatgacatctcttatatatatatatcagagaggacagactaaataacagaagcttcattgtaagcagggataataaccatcgttttcatagcataacaatctaaaaacaatttttactctatttaagtttacttaaaacta

SEQ ID NO: 231 - DNA, 200 bp, Lawsonia intracellularis
tctataacttgctataattatataaaattatagaattattattacacaatatatttagatagtaaatttttttgccaaagccaactatcatacaccatatcttcaagacctttttgtgccttccaattaagctctctgaatgcttttgttgggtctgcataacaacttgctacatctcctgaccgacgagcaacaacaca

SEQ ID NO: 232 - DNA, 200 bp, Lawsonia intracellularis
ataggggacagaaatattattcactttttcaaaagtatgaataagttctaatacgcttatacctttacctgttccaagattatagatatgacaacctgttttattttcttctgccttttttaacgcagccatatggccagcaataagatcagtcacatgaatataatcacgaacacctgttccatctattgtctcataat

SEQ ID NO: 233 - DNA, 200 bp, Lawsonia intracellularis
catcaccaaaaatatatatttctttctgtatgccagcagcaacctggcaaattataggcattacattcgttggtgcatttttagaatgctcacctaaaataaatccttttccaccacctcctactgggttaaagtaacgcaaaataaatgcattaaacatgggataagcatttgctacatcaaaaataatttgctcaata

SEQ ID NO: 234 - DNA, 200 bp, Lawsonia intracellularis
tgtagttttgtttttccataaggattgatagcagctagtggatgttcttctgttaatggtaaatattgaggaataccatatactgttgcagacgagctgaatataaatgtactattatatttaaggcatagccgtaagatagttaatgtagaattataattattttgataatactctaatgggatctttagagattcagc

SEQ ID NO: 235 - DNA, 200 bp, Lawsonia intracellularis
tatagatttatacccagcaaaatgaataacagcatcaaaagtatactttgaaaaaagtacttccatcattgaagtatcttctacatttgcttttacaaactctattttttcttttacaatactttcaataaaatatactatatcttcactactattatggagattatcaacgcataccaccgtatatccgttataaataa

SEQ ID NO: 236 - DNA, 200 bp, Lawsonia intracellularis
gctcaataaccatatggcttcctaagtagcctagtccaccagtaacaagaatttttttcataagaaaatcagattagtatataatagtactacaataatatatatatatattatgttgggaagataatagaaataatctttatgatatcttagtaccacctataaatgccataactactcctatacacattcggataata

SEQ ID NO: 237 - DNA, 200 bp, Lawsonia intracellularis
tagtatataggccggataacacctgaatgaatactttgatctgtagtattttgatacatagctacaccaacttctataatcttacaactatttcgataagataaaataagcatatctgcatctgggtattcatccgcaaatttttctgatgcccataaagaaagtgcatgatgcgaaagagctctataaccacttgtagg

SEQ ID NO: 238 - DNA, 200 bp, Lawsonia intracellularis
atcagtaattttttgtcctgttaatatttttattagaaaagaaaaaaaatttttaccaataagtctaaatggttgcatcgtatagtccccaacattgagaaatcgactaccaatcacaatatcggcattatttgtaacaagagtatgcaataaaagtatactatcatctgggttatgttgaccatcaccatcaagattga

SEQ ID NO: 239 - DNA, 200 bp, Lawsonia intracellularis
taatatatttatacccattcaacagtgcatacttataacctgtttgtaatgcaacagctactcccatattaaagggatgacttaatactatagcttttgcctcttctgctttttttgctgttgcatcaggcgaagcatcatttacaactaagacatcaaagcctaacttacgtaattttctaacaatacatccaatatgt

SEQ ID NO: 240 - DNA, 200 bp, Lawsonia intracellularis
ttttcttctttatatgctgggataatgacaagcgtttctcttataatttcatatagatatatattatttgagagactttgtatatctatagcttccattttctatcctaatagtaagcagaactaagcataactgttttaatgataattaatagcatattactatcttaaaatactaatgatgatattcacataactagc

SEQ ID NO: 241 - DNA, 200 bp, Lawsonia intracellularis
ctatttaataagatatcttctaaatttcttcgtccatcaaaaatagcagctacttcaacatgatcatcttttatcctataaaaaatacgccaaggatgaacattaagctctctaattgtacttatacctaactgtaataactctggtgtatatttccctcgttcaggcatcgaggacaatgatacaatttttttttctaa

SEQ ID NO: 242 - DNA, 200 bp, Lawsonia intracellularis
ctttatccttgctatttttgcttgttctaaggagtctgtatgcataatataaagaaaaatttcaaaaagatcatcttcagcttcggatgttaataaaacatcaaaagcattattcgacatagtctgctatccttttatcaagatctttaaatacttccttaactggtttaagattaccttcatcagcacttttaaatcgc

SEQ ID NO: 243 - DNA, 200 bp, Lawsonia intracellularis
aacaacaagactttaagcaatactatattattttttaattgttcataatctttaatccccataagaacagcagaggcctctccattttgtgtaataatcataggacctgaaatatttacctgctctaacaccttagcactattagcttttatataactaataggttttatatcttgacttaatttcataatacctcccaa

SEQ ID NO: 244 - DNA, 200 bp, Lawsonia intracellularis
aattattaaactaaatgtagaccatattcggtttaagtcaatagtttgatatacaccctagtacacaatcactagaaataacatagtaaattttagaataaataggattttgctattcgggttttggagtagatgtataattacatattttataatatttttaataacataagggaaaaccttacatagtggtgtgtaaa

SEQ ID NO: 245 - DNA, 200 bp, Lawsonia intracellularis
attttttcgggttttgaagtaggatgttattatagtaaaacaatctatttttataaaatgacattgtaatttaggtaaaaaaacaccattgggttttgaagtaggataattcgggttttgaagtaggataattcggattttgaagtagattttttcgggttttgaagtaggatgttacctataaccataagaacctctaa

SEQ ID NO: 246 - DNA, 200 bp, Lawsonia intracellularis
aggaaaataggtaataaaagaaataaaggtaataaagggataaaagaaatatttttttattaataaaatttttcgggttttgaagtagagtacacttttattcttctataatatatttttgtttttctggaaatgttgtctgctctcgctcaattaaaataatatcttgttcaacaaaacgactttttttagttaataac

SEQ ID NO: 247 - DNA, 200 bp, Lawsonia intracellularis
tgatgtttaataagctcagctaatgcaagctttaacatttggcgtgttttccatagtggttgctctctatccatattcaatgcatctgcaagtgttaaaaaatgtcctgtaaaaacaagatcttttttatgactttgaacaaatctatataacgctttagcaatacttcctttaagtcctacacgttttaaaacatcaat

SEQ ID NO: 248 - DNA, 200 bp, Lawsonia intracellularis
cattgttattgtttttgcataatatgcttcataaaaaaatggattaactgttactgctaattcttttttatcatcatcccaaaaaacagctgaaagcatagatgtcatatatcgctttttgggttcacgtcgttttcctgcttttgttttacctcctgcaagagttagttcaacaccagctactgtaagtaactttaatc

SEQ ID NO: 249 - DNA, 200 bp, Lawsonia intracellularis
ctcgaataagcctattgtaatcttttttactaggttttgtatatcctaatagttttaataaaggtaatgcaggccctttatatgtatatgttttctttccctccacttctgtaggctttctatgatgacttacaccatttaatattgccaataaggccattaatgtgtcttcttcgtatgtagaaagttttggtccagta

SEQ ID NO: 250 - DNA, 200 bp, Lawsonia intracellularis
tatgtaatttctccccagttggcagaagtgataataaaatctcgaaggaactcacgatttcctaattctttgggattcatagggaaaaaagggctacatcgtgttaaatctgtaggatacccacaccatgtcattaaactattttgctctggtgctgaactagtaacttcttttcggatggctgtagcttgtttttgagc

SEQ ID NO: 251 - DNA, 200 bp, Lawsonia intracellularis
ttcttcacctaattccattcctctacgtatactagcaatccatgctttaccaatagggctaccactttttagctcttctagtaattgaggattaatacatgctaactctttttcttcttcaggtgttaattctatgttagcattcattacaaatatctccgaataggataattctattttgttgtttagaatggtaatag

SEQ ID NO: 252 - DNA, 200 bp, Lawsonia intracellularis
tatatcatgtaaacaatatatcttcaaatggggacgtatatatttagcatatagtatatatacaaaaaaatagattgttatttgacaacatctctagttattttttaagttaattactattaaaaaataaaaatagtatttataaaaaaataatgtttacttataattgtaaaattttttcatcccctacaaaatttttt

SEQ ID NO: 253 - DNA, 200 bp, Lawsonia intracellularis
atattaaactttttcttttggggagtcatttttctttttcttataccaccattccaagcacctgatgaacaggtacacttccctagagtatttgagttatcatgtggtaaaattttattatctaaaggtgaaaaagttggtggctctaaccttccaacatctattcaagcgtttacttcaataaggggtgatatcccttt

SEQ ID NO: 254 - DNA, 200 bp, Lawsonia intracellularis
ccataaagagcataaatttgactataaaacattatatcatcatcttacaacacctattaatgaaagagaaacgacttttatcacctttagtacacaactctattcaccattccaatatcttcctcaagtattaggagtaagagtaggtaaaatattcaatatttctatctgtattttatactacttaggaagacttttta

SEQ ID NO: 255 - DNA, 200 bp, Lawsonia intracellularis
gcttatgtattattggagtgctcctttatttatctataaaatatatgccatttaataagtgggcattagtgatgctttgtttatcacctatgtcactatttttagctgtatcccactcctctgatcctatgatatttgcatgttcatttttattgatagctattgttcttcgtagtatgtatgacacctcttttcgattg

SEQ ID NO: 256 - DNA, 200 bp, Lawsonia intracellularis
agtgtttccattactgggttacttttattatgtattgctacacttgcaacttcaaagtttggaagttattttcctattcttttaatagtattattaatgcctactatagtattttcagataaaagagttggctatatatttaaactaatgctgtttgctataggcattgcattagcattgttttggaatctaaaaacaaa

SEQ ID NO: 257 - DNA, 200 bp, Lawsonia intracellularis
atttatttttgatgagttatcagatagtaacgctatttttactaataatattcatatgttatgttcttatgaatatattcagcttgttttacgcacatttataatactggctcatcgattatacctatctttttttaccctaggctggcttgataccccactacctaatattatgtgttattgttggggggttttgctta

SEQ ID NO: 258 - DNA, 200 bp, Lawsonia intracellularis
tcttactcacagttttttctagctcatcgatatctgcatatattcctttacttactagaatacttttcttttttatttcattagtaatatcaataggcattgttacaagtatgtatttggggtgtggaactacaggagagaatgttattaatggaattcaaggaagatattttttccctatttctatgcttgttcttctc

SEQ ID NO: 259 - DNA, 200 bp, Lawsonia intracellularis
acattttcaaatcttttccttattactgagcataaggtttttcaaaaaataaaatatactatttttgatagatggtacgtagtacagttattcttaatagtatttttgatgacaacagtatatgtcgtttttcaaagatattatgttagctagtattctatagttttttttttttttttacttaataaacataataataa

SEQ ID NO: 260 - DNA, 200 bp, Lawsonia intracellularis
taataataataataataataataataatgtttactaaaattactagttttactaaaaaatataggtaactgtagttgatatggtatattttgttttttattatttttgtgtaatcttaataagataagaacataacatatagaggaaataatggctaaaataatagcaataagtaaccacaaaggtggggtaggtaaaac

SEQ ID NO: 261 - DNA, 200 bp, Lawsonia intracellularis
gacatctactgttaacattggtgctggtattagtaatggtaaaaaaggaaaacgagttcttttaattgacttagacccacaggcaaatttaagtcaaagtcttggggtccagcatgctgaaatgactatttatggttctcttaaaggtagctatcctttaacaccaatagaaataacgcaaaagctttttttgattccat

SEQ ID NO: 262 - DNA, 200 bp, Lawsonia intracellularis
cgacacttgatctttctggtgctgagatagagttaagctcagaagcaggtcgagaatttcttttacaagatctcatagaaccattacatgatcagtatgattttatttttattgattgtcctccatcattggggcttcttacaatcaatgctcttacagcatctgatgaagtgtatatccctctccaaactcaatattta

SEQ ID NO: 263 - DNA, 200 bp, Lawsonia intracellularis
gcattacatggtcttacaaagcttttagaagtaatagaaaagatacaaaaaaggttaaataaaaatttaaaattaggaggtgttatccttacacaattcgatgcacgtaagacattagatagagatgttgcaaacactatacaagaacattttgaggataaagtgtttaaaacaaaaattaggaatactgttgttctagc

SEQ ID NO: 264 - DNA, 200 bp, Lawsonia intracellularis
agaagcaccaagtcaaggcttagatgtttttcgatatagtccaaaaagtatgggcgctgaagattatttactgctatgtaaagaaattttaacaaaatctaaaaagtaagttacaattgttaggtaaacaatgtttattaaataaatgtagtttagtaaaaaataattgattatttggttgtataaataaataaaataat

SEQ ID NO: 265 - DNA, 200 bp, Lawsonia intracellularis
attgacataataagtaatgttgatagtctatgtaaataaaataaacataataatattgaaaaactacataatgtaaataaatgtattaaacaaagtagatataataaatcgagtatactatgtctaaaaattttactagtggtttagctacaattttaggagaggctccttctaaatctaaaagaaaagagacttctgat

SEQ ID NO: 266 - DNA, 48 bp, Lawsonia intracellularis
ataaaaaaagtaattacaaaaagttctcaaattggaacaaaagaaaat

SEQ ID NO: 267 - DNA, 200 bp, Lawsonia intracellularis
tgatattttgtttggagatgaataactgacctcattattcattatttgaacaattaattacttcttattaataaaaaataatattgatatatgatttatcctgttcataaaaatatacagaagaaactaactccaaatcataaaatcattatcaccagatggctaaaaataataaaaagtttatcaccttataataaata

SEQ ID NO: 268 - DNA, 200 bp, Lawsonia intracellularis
ataaagtagttctatactgctaattatagaacactaggaaaaggtaaatttattaaaaaaagctagttagtttacaaaatatattaagtagatatctataaaaacaacttggaaagtaatagactagtatattgacttttgtattaccaagtattacctgttaacatctaaacctgtaactattacaactagaagggtta

SEQ ID NO: 269 - DNA, 200 bp, Lawsonia intracellularis
acagtgaaaactttgtctaatacaacttctgttaaacttgaagactcagtaaaaacacggattaaaaatcttgctgctattcgtaaacggacaccacactcaatcatggtggaggctattgaagaatatattgataaagctgaaaaacgtgaagcttttagacaagaaggtattaatgtttataatgactatcttaataa

SEQ ID NO: 270 - DNA, 200 bp, Lawsonia intracellularis
tgggttacacttacctgtagaagaagctatagcttggcttaatgagcttgcaaatggtaattatgtggagccacctaagtgtcatctataaaaattgaattcatgccatatgcgattgaatgtattaacaaaatttataccttcttagaaaagagtgataaagaagcagctaaaaatatagcaaaaattattctcaacaa

SEQ ID NO: 271 - DNA, 200 bp, Lawsonia intracellularis
aatcagaatattagagaaattccctaatttaggtagatcttccatagacttagaaccagagcagcgagagcttattgttccttttggagcaacaggttatgttattctttatacattacaacataacattatttttattttatctgtaagacatcaaaaagaagttggctattaaacaaaaacttctatctttatttttc

SEQ ID NO: 272 - DNA, 200 bp, Lawsonia intracellularis
tctatattcattaaataaaaaagcatcctagaagggcgcttttttcacccttttgcatacaaaacaaatatattttaccgcatcttatataaaatatcagtaaagggaaatatcctctaaaaaatagactacaaaaattttcaatatacatgaaaatatacttatcaacttcaaaaatattactaaagaaactaaaaact

SEQ ID NO: 273 - DNA, 200 bp, Lawsonia intracellularis
aatcatatataacataatgtttaatacaaatggtttcataacagcaatcaatataatatgatttattatgacatagtattctatttatatagtagaaatataaaaaaataccttataaattttattacaataattaatactagtttttctaaaaaattagaataattgtaatttttaaaattataatgcttttaacaaaa

SEQ ID NO: 274 - DNA, 200 bp, Lawsonia intracellularis
ataagtagataataatataaaaagtataacatttttattaattaaaaacttatatgttctttaattaatcattatacaattttaatgtagttagaaaaatataagtgatatgtacaatgtactataatagatatattaaaaatacacttttatagatcaagtttattattctataaataggataacaatatataatagtt

SEQ ID NO: 275 - DNA, 200 bp, Lawsonia intracellularis
aaaaaaactattagaggaattattcaagcaggataaacattattgttacaaaacaattatcatttacaccatatgttgaatatctaatttctactgtaaaacaaaaataaagaaattttaatcgaaatgactatagtctttcgtaatcattgtaaattttctaataattcccaactacaaccatagataacagagatatt

SEQ ID NO: 276 - DNA, 200 bp, Lawsonia intracellularis
aactattgtacaatcaatagtttgcactgtagaccatataattgatcctctaagaaaatatgaaatttctataccacatagaaaaaagccacatcaggacagaagtaggcagttcttacacagctattgtaatagataatcttgaattttccttactggtataataagtgtatcacaaaaaaaatcaaaagactatatgc

SEQ ID NO: 277 - DNA, 200 bp, Lawsonia intracellularis
tccatttatattaacttatttgcataaccagtaagttttcattataaaagttatatgctaactattttagcatagttatcaaaaaagacatatcctactgtctttatataatattataattttcagctataattaataaaaattacttaaactaattatagtaaaaatattgtttgataactttagttaactagttgtaa

SEQ ID NO: 278 - DNA, 200 bp, Lawsonia intracellularis
taatattactaacgattttacaataaaaaagttaatctatttcattataaagagtaatccatgggaaatcttcattcccactctctacttcttgttcaactatagtatctaacaattcaccaggccttactttcatatgtagagaaaattttactaacatttcaactgatggatgttcttcacccctttcaatttctcca

SEQ ID NO: 279 - DNA, 200 bp, Lawsonia intracellularis
atataatttcctttaacaccaagcttttctcctaatctagcttgagtcaatttagctgttttcctatagttacgtatgactagtcctatagacttaaaaaattttttagccatctttttaaataacctataaaataaaatattgactagattattaaaatgacataccaggtatttataatttattaattgaatgagtta

SEQ ID NO: 280 - DNA, 200 bp, Lawsonia intracellularis
ataaattataaatacctgataagggctaatatttatttactagcgctgtcaggtacctttaaagataaaacacacaaataaaagtatagggagttcctccaatacctccctatacttttttatatcttgaataatgtcgtcaataatataaagatatattaatttctcatggagaatctatatagtgaatcttgatattg

SEQ ID NO: 281 - DNA, 200 bp, Lawsonia intracellularis
aattaacaccagaagaagaagaagaacttgccacaattaatccaaaattattggaagaacttaaaacgggaagtcctattggtaaagcatggcttgctagtatacaaagaagccgtgaattaaatgagttagcgttagaacaagcaaaagagatacgtgaagaagtcgctaaagccgctccagaacaaaatagtttaatg

SEQ ID NO: 282 - DNA, 200 bp, Lawsonia intracellularis
acttggtgtggttatccaacagacataacaagatgtagtccatttttccctatggggccaaaagaaatatcgcacagaccatatcttgaaaactttattataacttctgcgaactggggagaaattacctatacaggaccaaaactctcaacatacgaagaagatgctcttatggctttattagccattcttaatagtgt

SEQ ID NO: 283 - DNA, 200 bp, Lawsonia intracellularis
cagcgaataccgtcagacaacagaagtagaaggatctaaaacatacacctataaaggacctatgcttccattattaaaactgttgggccatgaacgaccaggaaaagcaaactataaccatcttcttcttgcattacaaaggcttatgtcggcagtagtaaagctttctatatccgtggggaaaacaaaatcaggaaaaa

SEQ ID NO: 284 - DNA, 200 bp, Lawsonia intracellularis
gaaaagagcctaaaaaaatagacatgactacaatgttagctcatgtccactgggatgaagaaaagaaagaattatcagcaactattaatcctttcttttatgaatcttattatgctggaacagtcacaatgattgatgttcttaagcgagcaggacttaaagggagtatagctaaggcattatatagatttgtacaaagc

SEQ ID NO: 285 - DNA, 200 bp, Lawsonia intracellularis
catcgtaaaaatcctgtatttacaggacattttttgacacttgcagatgcccttaatatggatagagaccaaccatcaaaaaaaactcgtcagctattaaaaacagctatcctagaacttataaaacattctattttaagtcctgaaagtcgtttcatagatcaagatattgttaaacttgaacgtgtacaagtaatggt

SEQ ID NO: 286 - DNA, 200 bp, Lawsonia intracellularis
ttgtgataaattaaaagtataggtacttaaaaagccgattgtatttactactaaaataataaaaatttttttatttttatatatcctttattacctttatattcctttctatagtgttttttatctagatagagtagcttttatagatgagttggcacttaaaaaaccgagaatcggcacttaaaaaaccgagaatcggc

SEQ ID NO: 287 - DNA, 200 bp, Lawsonia intracellularis
acttaaaaaaccgaaaatcggcacttaaaaaaccgaatgagtacttaaaaaaccgaacataactttaactaattattactatatataatattttttatccttcattcggttttttaagtaccattaactataaaattaaataagctagtctagccttatattttgtatgataaataaaattaattgttagtacttaaaaa

SEQ ID NO: 288 - DNA, 200 bp, Lawsonia intracellularis
accgaatagaagaaataattctaattcatttgtttttattgttttaatttagtattattctgtttactaagaatgtattttgtctctttttatagtaaaagagataggtatattaaaaaatttgtgtatcttctatttatggttattatcagaactaaattttgaaggtgagaaaactatagctctatttttactaagtc

SEQ ID NO: 289 - DNA, 200 bp, Lawsonia intracellularis
taaaatattaataagtttttatttgttattttttttattaaaattataataaaaggaattagtgggctataacagcatctatatcatactagtatagcaatgaatatatccactttgtaaatagcaatcggttataaatgttagtttatttgttaagttagcggatgtatatatattattagttataatagattaatttg

SEQ ID NO: 290 - DNA, 200 bp, Lawsonia intracellularis
ttttattattgttattatttaataactagttacttatatataatataatgtatgtatttaaataaagaaatagtttattatctctatatattctattttataggagtaatgtatggattttgagtttagctttagagatatagataaagttgtaaaagacgttgaagatatgtatgaaaaagatgatacattatcattag

SEQ ID NO: 291 - DNA, 200 bp, Lawsonia intracellularis
atcttttagattatttccctggtgtagaagaagatgaagaagatagagattttgaagttcttacagaatatgatacagactagaatagttatattcgatatgattcatttataacacaataaatgatacagttagaaacactacaaacttattatatacttatagtaggttagttttaatctattcatagaactggtttg

SEQ ID NO: 292 - DNA, 200 bp, Lawsonia intracellularis
aattctttatatagcaaggataatagttaactacataatatagttattagtgtgttaaaatttgtatgtaaatcctgcttgcccaccaatgcctttatcatttcctttatctccaaatatatcacagtgaatattaaaatgttctcccaataatatatttgtacctattgttgctctaactacacttgtatcattgtcat

SEQ ID NO: 293 - DNA, 200 bp, Lawsonia intracellularis
gcttgaacttcatttgaaggctctgggaactaattgcaaagtttccagactgaccttttatcctttcaataccagcataaagattaataggtgtggtaactggtagcttatattcaacggtaataccaagagaacttgttattaactggcttttatctaatatagccttatcattttgaattcctaaatcaaaatggtgt

SEQ ID NO: 294 - DNA, 200 bp, Lawsonia intracellularis
ttagatgtttgttcaaaaataagttgtccacgaggattcattttaataccgttgttgaaagtgtatttccatccaagttcaagtgcttctgttggagttgtttctgtccatttaaaatttctatagaaccctgtagaattagtatgtaatttactagacgcaagttgtaaggtcaatgtactatagagcccagttttgtt

SEQ ID NO: 295 - DNA, 200 bp, Lawsonia intracellularis
atggataagacctacataaccactaaccatacctagctcagcatcattttttgtagagttgacgctagaccatttacttttacctttagaagcaccaaaagcaagaccataaagggctttcatatctaaccttggtagttgttgaagatagtcatatcctgctgttgccattatccatggcatttttgctttgctaccaa

SEQ ID NO: 296 - DNA, 200 bp, Lawsonia intracellularis
tagaagtatcaagactttcatgtccaccttgaacatttatccatagtccataatgttcgttgtctaaaagtttacttgaacggttttgtagagtccatatatgttgttgtcttagccagttagtagtctcacgagcaatagagaaagagtaaaaatcttgagatgcttggatattattaacataccaaatagatgttgtt

SEQ ID NO: 297 - DNA, 200 bp, Lawsonia intracellularis
ggatcaaactcaagatcactccaaatgagaccacttctagtttgtttaacaaaaagatctggtgatgaaaaagattgagagacaaaagcaagtggcaccatgctacttccaataagttttggtgataagcttaaatttacttttaatggttgatggataactaagagtgattgaggacctccaagaaactgtataacagg

SEQ ID NO: 298 - DNA, 200 bp, Lawsonia intracellularis
ttggttcccaggtattaattttctaggtactagtgtaccgccattagcaacaaatagattggttatagataaatcagctagttgaatatttgaggtaatcagagttccggacaagattaaatttcttgtatccaataaaaagggcatatttttagtgccccattgtgtcatagcacctttttgtatgttaactaaatatg

SEQ ID NO: 299 - DNA, 200 bp, Lawsonia intracellularis
gaagttctggaccatttattgtttttacaattgatctcttcccaggagtaaagtttatggttgaagagttggcattacctacgataattctttcaattaatccaccagacatgtttagtattgctaattcagtaattggtcttgtgcctggtatgaagttttctgaacccatagttaataatccaatagttccaccatta

SEQ ID NO: 300 - DNA, 200 bp, Lawsonia intracellularis
acatttgctgtagctatcatagtacgaccattaccttgtgagcctaaggtaaggtttgcaataagtccgtcgtgtatggtcgcagaggaattaatagttgtggctgcagctattacattagttccgacattaaggttagtaatattgccactattaatgattacagaggcattctcagttactccaagtccattgaaggt

SEQ ID NO: 301 - DNA, 200 bp, Lawsonia intracellularis
tccgacattaaggttagtaatattactatcagtaacagttgctgtagttgatattgtatgaccttcgacactaccaaggtttaagttagtaatgttactagtattaacagttacatttagtgtgttaagttgattattttgactgacaggcccacattgtatattttgtatagtactgcttgtgatatctagggtaacag

SEQ ID NO: 302 - DNA, 200 bp, Lawsonia intracellularis
gacctacaagcattccaccagcccttggtataagagtaatatcattaatctgagaattaattacatttatagatgtgtccccatatactgaagaaccaaagtctactggtgataacccccttatatttgaatctgctatagatattttgagattacctaagatattacctctaccagagtttataagctcaacagtagat

SEQ ID NO: 303 - DNA, 200 bp, Lawsonia intracellularis
ttttttacagttagagtagcatttccttttatccctgcatctacttctcctgtaatgtttacatattgaatcctagagtcttcaacatcaatgtttatgtctccatttacagtaatacgattaggtccattgcttactccagaacctattaatagtggagtttggacgtttttcaaatgcatgttgatagagcctagtac

SEQ ID NO: 304 - DNA, 200 bp, Lawsonia intracellularis
atgtccattttgagtatagacaccaccataaattcctctagtaacagaaacattttctagcttcatatttactgagccagtaacggttacaagtcctctattgctgatacctgcaccaattattctttctacatcagtattataaacagttagagtaacattgcctttaactgtatttgggttgttaaaactagacctac

SEQ ID NO: 305 - DNA, 200 bp, Lawsonia intracellularis
caccaccaataattctgaaaacagaattgcggaaggctcctactgttgtgaaggtaagattagtaggtcctgtttcaagggttcctattgtagagtcagaacctccaaaaaaagaatcaaatggtttgtttacattgattaaggtttcggttctgccctcaaaaaagacgtctgcagcataaattttttgtttttctgta

SEQ ID NO: 306 - DNA, 200 bp, Lawsonia intracellularis
agtgtaaaaaagaaaacacataaggaaaataataaaatttttatgatttgatgcttattaattatattatacataatattctttttattttttagttaaggtaaagaagaatagatataactaattaagtataataatatataaaagttttttattcaatttaaattaatcttattactttttttttaagatctattaag

SEQ ID NO: 307 - DNA, 200 bp, Lawsonia intracellularis
tagatatctaatatatatttacttacattaagttaatatattaaaattagttaggtaaataaactattaatagtgtataatttttattttatatagaattatagtataaattttattgtattgatatttaactataataacgtaagtataataatgttagcttaaaagatatagtctaagataaaggattagatattatt

SEQ ID NO: 308 - DNA, 200 bp, Lawsonia intracellularis
atatttaatacgttatgttaaataaatgaattttgctcataaactaaaaaatattttaagttaaacataaataattatattagagaataatctttaatcttcttactaagaaccgtactattaagatattaaattatttagtaataacaaagcgtatcccataacctgtattacaccacttttttacttcttcaaatttt

SEQ ID NO: 309 - DNA, 200 bp, Lawsonia intracellularis
tctttaaaatttggatcaatagcagataagcgtacaaaattttcccctacttttataagaggatcaactcctctaaattttggttttatatttagctccccttggccaaaagggtattctttaaaaatattgtgtacatcttttagatgtttcattcctttattgataaatttattattactagattctaacaaatgtaa

SEQ ID NO: 310 - DNA, 200 bp, Lawsonia intracellularis
tacatttttatcagtaccatattttatctctgatagtgtaataagctttatttttaaagcttctttcaagatttcagtgaaatattcataaaaagcaaaattccatggagctccataaagttcttgagtaaattctaaagatagcattcctataatttttgcaggttttttatttaaaaagaaccaaataccatcttgaa

SEQ ID NO: 311 - DNA, 200 bp, Lawsonia intracellularis
attttaaattatctataaccattttagcttgattgcaggatattttttctacaataacaccagtatgcaggagatattggatacgatcagcacaaaggttaggtaaaggttgttctagagcactgtaagaaggattgtcaggatcaagatctttaagaaatatcccataaggttctgttactttttgaacgtgcattgtt

SEQ ID NO: 312 - DNA, 200 bp, Lawsonia intracellularis
tttaaaaattttaaatgtattgtatcttgataagatttttctaaattacttttataaagtaagtgatcagcaatatgtgaaaaaacagtatgtgatacatcatgaagtaaccctgcaacttgttcattcaagggagcatttgctttttgtaataaagctaatactcctatgctatgttcatacctattgaagtaaggcat

SEQ ID NO: 313 - DNA, 200 bp, Lawsonia intracellularis
atatccaaaatatgttattggtccagattgatcaacatactttaaccgttggagtgtattgtgttctataattttttttaaaatagggtgttcaaaagtacattccccccatactgtctgtatggtaacagttcccaaagcttgttgtaataatgtgccaagaataaaagtagtactaagtaaagtaatagtaataaact

SEQ ID NO: 314 - DNA, 200 bp, Lawsonia intracellularis
ttaaaaaaattgtattatatccttttattaaggattgatgtctttttttagaaaaaaaactcaccagttaatactccatctttaattggttatttagtattattcaatgtaataaaaataacttgtaatattacaagctatttttattaaaagtgttgtttataaaaaagttttactttaaaaaagtaacgtagttataa

SEQ ID NO: 315 - DNA, 200 bp, Lawsonia intracellularis
aaattctttgttatacaacaaagatttcatatagaatttttttattgaagacaagatatgtgtttttatactatgttaactaaagatagataccttaattttatttaatagtaggctttattacatattatttactaaactagctctttaagttaaagagcaaaggggattatttttatcctatgagtaaagaggttatt

SEQ ID NO: 316 - DNA, 200 bp, Lawsonia intracellularis
aacagtagcagtttttacattgaaacttggtaacatattttaaatattggcttatccttaagtagaataacctaacaagacttagctgttattatgctaaaaatatataaatttttatttaagaaataattttttgttatcgttactctacaagtagttgcattgtgttctatagtaaacaagcctaaatattttaagca

SEQ ID NO: 317 - DNA, 200 bp, Lawsonia intracellularis
aaaaaagctgttatattaataagttattaatacaaaaaaatattttgacaaatgatattttaatattatttagtcatttgtaagaaaaaatattatttataattatactagtacattaaaatctatcttacttgtttttaatgtataaaatagcataaagaaggttattcataagaataatataagaaagcttagaaagg

SEQ ID NO: 318 - DNA, 200 bp, Lawsonia intracellularis
ttttatctacaattcaatttattatttagtaaaaatggttttcaatataagtctacaatagactacagataattttaacatacattagggcatttttatatctctattacgtatttttttaagatgaaaatacgtaaatcttagaaggtattatatagtagcatacataatagtattgctatctacttaccatactactt

SEQ ID NO: 319 - DNA, 200 bp, Lawsonia intracellularis
tatcaaaaattttttatctactataaaggatatatatgatagtaaataagctgtcaatctttatctataactatactactaaagtacgacattatattaattgtatctaccatacttgtgtatcttatagtcaaatttttcgaagttggctttggtatcgtcgacaattaagaataggattacttttctttttatattta

SEQ ID NO: 320 - DNA, 200 bp, Lawsonia intracellularis
gttagtgtttatggcttatcattttcgaaaagtcctgaagaaaatgaagaagaagctaaaggacgtcaacgggtacaagcaatggaacttagctttcataatgcagcaattagtcaagaagtaaatgagactgtatcttcaatggaagccgaacttgaagaagaatcagcatatgctacagaattagagatccttgtaga

SEQ ID NO: 321 - DNA, 200 bp, Lawsonia intracellularis
tgaaacagtaaaaacattttttgaaactactgatatagtaactgatgatgtggtatcagttatgttgcaaggtattgatgaaacggcttctgatttagaaaattcagaagtaagagctagaaaaaatttagaaaaacttaaacagcttacagagcacaaaaaatttttgattggtcaaaataagctaagactttctaatc

SEQ ID NO: 322 - DNA, 200 bp, Lawsonia intracellularis
attgttgtcgattacaggaagttatactagaaaattctgatattactcatctagaagatgctgttaaaaggaatagacaaaggctagctcaccaagaagtcatgctaaaacaactagaagaaatatgtagtagaactcaagagaagcagctttttcaggaggagagaaataatagtattatggctgaggttgcttcatta

SEQ ID NO: 323 - DNA, 200 bp, Lawsonia intracellularis
gaagatcttttttatacacagtgctctggagaggaagatcatgatgaaaatactgcttctactgagggtaattatactcaggagggaagttttgatgatatgccacctttagaaggagaggaagatgaggatattactgatcaacctcaacctctaagtcttcaggagaatcaagggaaccaaagcagtactatacaaga

SEQ ID NO: 324 - DNA, 200 bp, Lawsonia intracellularis
ggatcaagaaggtaatagttcacaaggagggtctgtatcaggaccacattttatgtcaagctcgggttctaataattcccaagggggagctagtggtggaacatctacattaattcctggctataatgtacatagtcaaatgagctcactacagggattacaatgtgtccttttatctgctgttgaacaagtagcagaga

SEQ ID NO: 325 - DNA, 200 bp, Lawsonia intracellularis
atttaaaagtattaatattaaaagcaataaatgtatcaaaagaaaataagttcaatgtagcaagttttaactacagaacgtctaagaaaaatacttcttctcagaaacatttttctgcaaatgttccagcaaataaacaaggagtagatagtaggatagtttcctctttagacaagtttcatgtatttgctgttatggat

SEQ ID NO: 326 - DNA, 200 bp, Lawsonia intracellularis
agctatttaatgaatttagaaagtaaagttcgttcaggccaattaggtattatcacaaatattttttcagatttatctataggcttggcttatgctcataacaatagctcatctaaagaacatattggggcaatgtttggttcagttatagggtcagcaaaagcaaagatgaatactaatgcactttcagccattttcat

SEQ ID NO: 327 - DNA, 200 bp, Lawsonia intracellularis
atggaacactaataagacaggtttttctggttgtatttcaagttattatggctgggggcagatgaaaaatgctagacaatatttgcatactgaagaaatcataagttctaaagggtctcctgatattatgttaggagggggacttatccaattaggatataattgttttatttcaaaatcagtaatgattactccctata

SEQ ID NO: 328 - DNA, 200 bp, Lawsonia intracellularis
ttgaatatctttttataacaacaggctggaaagaatataatgaaattacaggtactttgccttctcatataagcagtactaaggagcagttgattagtaagaacattggtattagaagtcgtataaatcttatgggaaattctcaacttcaaacatgggttacaggtgcttttggacaacgtaagctaggtacgattact

SEQ ID NO: 329 - DNA, 200 bp, Lawsonia intracellularis
gctcaaccattgaaatcgaccaactctatatataaagctatggtccaaaaagctaaaaataaatatgttcaaggggaaggaggtctctcatatgaaattatagttacaaataattgtaaaattggcctaagtggagatgtccagtttgaaaagaatagaccattgaagaacggtaatgtgagatgtttttttcaccttac

SEQ ID NO: 330 - DNA, 200 bp, Lawsonia intracellularis
atactaatctgatattattttataattgattcaatatatagtgattactccctattttaaaagatacaatagttctttatgtctttttttaatattattagaggataacatgggatttttactttaacctatttgtaataattaggtattcattttcttttaataaattttttatggtaaatattgatgaagccattctt

SEQ ID NO: 331 - DNA, 200 bp, Lawsonia intracellularis
caaagcttaaaagtgaccatataaaaagacgcctattggcatttccttccagatgttcagttacaagctcatggactactttacgatcaaagtactcataaaggcgtacattttgtgaaaataaatatcgatggacaaagtctatactttcgcccctgaaccaagaagcatctggtgctgaaaatccttgtttaacagcc

SEQ ID NO: 332 - DNA, 200 bp, Lawsonia intracellularis
tcaataatgtgagttgggacatatcgttccattgctctgcgaaggagccatttaccatcatttgtttttttataatagcggctagctttagctgattcattttcgttgattcttaatgtttcattgagtctatgaattttacaccttacaggtaaacgcatagcaaaatcaacaaggtcattatcaagaaatggaaggcg

SEQ ID NO: 333 - DNA, 200 bp, Lawsonia intracellularis
tgtttccaaactgtgtgccatagaaagtttatcttctacaactagtaatccatgtaagaaagttttagcttcaaaatagagggaacgattaatactttcttcatgactggttacaggagaattattatcaccaaatatattacgaaaaatatcacgtgtccgtacatgacgaacatgagtttcaataggtttgaacatgc

SEQ ID NO: 334 - DNA, 200 bp, Lawsonia intracellularis
ttagtagatatcgattaggtataagtcgttgccagaataaataataacgatcaatatacttttcaaaactattttctcctttttctccaagagctctataataacgccaaggatatccaccaaaaagttcatcactaccagtaccagctagaacaactttaacaaattttgagaccaggtgtgctatacaaaaattggga

SEQ ID NO: 335 - DNA, 200 bp, Lawsonia intracellularis
taactttgtcctgtccgtggttcttctatatgccaagctaaacgaggaaatactcgttccatatctccagattttaggaccatttcatagtgttctgttttgaatagataagacattgcttctgctgcattacgttcatcaaaagcaagttctaaccctgaaatggaatggagatcaaagccacaagtaaatgatttaat

SEQ ID NO: 336 - DNA, 200 bp, Lawsonia intracellularis
atatgggaaacgtttagaagctaaagctgtaattgaacctgaatccattcctccagataaataagtacctagctcaacatcactttgcagctgacgctgtacagcctgctgaataagatatgttaattcttcttcatactctttatcagaatggatattcttactttcatcaaagcaataatcccaatattgtgaaaaag

SEQ ID NO: 337 - DNA, 200 bp, Lawsonia intracellularis
taagttggcctgtatttaaaggtaaaatagcatagtgcccaggagggaatatatagacattatgcagtaatgttttatctgttagaatattttgaaaagtaaaatattctagtagggcttcataatctaatttcgtacagaattgtggataacgtaagaaggcttttgcctctgaactaaataaaaagttattttggatg

SEQ ID NO: 338 - DNA, 200 bp, Lawsonia intracellularis
atagtatagtataatggttttataccataacgatcacgagctataaatatttgttttcgaataacatcgtatataacaaagacaaacattccattaaattttgttacacattgcgctccccactgaatataagcatgaagaatgacttctgtgtcactacggctaataaatgtatgtcctaattttattagctctcgtcg

SEQ ID NO: 339 - DNA, 200 bp, Lawsonia intracellularis
gatttcttcaaagttataaatttcaccattatatactatagtaaaaagtttatctgaagtagacattggttgtgctgcagcgtccgttagatcaagaattgcgagccgacagtgcccaagtgctatacatccatcaactacaacatttgccttgtctgggccacgatgtctaatagcatcgagcatatgacttaatactt

SEQ ID NO: 340 - DNA, 200 bp, Lawsonia intracellularis
cttttgaaggtttgtctccatctaaacaaattatgccacaaactccacacataatttacatctctttttaataattttggctaatagaattaatagtcctaaaagaggggaagggggggaatgaatttattactgattctataagacgctcaaaataatctttaactccaaagagggttttattagcaaatttgttacaa

SEQ ID NO: 341 - DNA, 200 bp, Lawsonia intracellularis
tcttcaggagtaacatcaggtatattataaaattttcgtaaattactatattgttcaggactacaactattaagtgcaatatgaataggatgaaagttaaaaatatatacaccaggtaaggcgctattaaataggggtgttaaccatctttgaggttcaagaatagcaatatcgtcttcccatatgcaagagaagtgtag

SEQ ID NO: 342 - DNA, 200 bp, Lawsonia intracellularis
taatgaacgtccatgaggagaaaatcgaataggtacaggttgtaaccctatatgtcctggtaaaaaagtagaaacttcattacaaatagatggaacttgttcttcaatataaacaaaaagtctactatcacgataaagactatgagaacgtatagacttagcttctggaacaatttgaagatatgattttaatatatttt

SEQ ID NO: 343 - DNA, 200 bp, Lawsonia intracellularis
gataaaaaagtgtattatctttttttatattatgattaactaaaaagtttggatgaataccgagttcaaagcgatcattagatgctattttttttaagataggacttgtatttgtaacaaaaaaagtagctgtaatgtcaaattgtaaacagagttcaaaacataatgcaatacaccaatctggtgcccagtctgtatca

SEQ ID NO: 344 - DNA, 200 bp, Lawsonia intracellularis
aaagtgattgcaattgcattttgcgtttgtatgggattaccaaaacaatcagttagcattgtctctttgcaacaactgtaatgcctgataattctgtcttcatagaaagaatattcaggttaagttcatcacaccattgagaaatttgctctggtgtctgccgatgagcattttgtggggcataccagtcaaagttaata

SEQ ID NO: 345 - DNA, 200 bp, Lawsonia intracellularis
tgttgcattgcatcaaaatctagctcttttgcatagaatgcttttaaaatgtaccaataaaaaaattcttgaagttttattttaccagctgggacatctaataattctatcccattaggaagattaagttccatattagattctccaagttgaatccctaattctgttaatggttttaaagcatcccatgcctgtttagg

SEQ ID NO: 346 - DNA, 200 bp, Lawsonia intracellularis
agacagtttatgtaattgttctcttaaataatcatctgaaaactctcgaataggactttttttagcataaacataaaaaagaaataagcctccattacgtaaaagaggagttaattttgttatggcttcttttgtagaatctgtatgatgtaacactccttctgaaaagatgatatctatactttcaggtttaaagggaa

SEQ ID NO: 347 - DNA, 200 bp, Lawsonia intracellularis
gatccattaaattttcttgtaagaatataccatcatagcctgcatcctgtatgcgtctacgtgctattgtaatagcatcagagatatcgacaccaatataatttaattgatgaaaacaatctcccaaaagttctaatgtagaaaatgctgctccacaaccagcatctaaaaatatagggtggtcttggatagcctttaaa

SEQ ID NO: 348 - DNA, 200 bp, Lawsonia intracellularis
tatatatatatatagtcataacggctttttaaccattcttgtgttttttttagcaatgctggtgaagtgtatgttttctcttggttccatttataactaaatatattacttgtttgaagttgtttgttactattagaattagttgttgatttccacactccatcgtccataatatattttttttgtctatcagcactaag

SEQ ID NO: 349 - DNA, 200 bp, Lawsonia intracellularis
aagtatatcattttttaaaaaacaaccggtattttttttaaaccattcaggcaatgatatcaaagacataaatcaatcctattacattaggttactactagataaattttcagccagtatagatataacttctttttgctcagctactgtcattgtatggaataaaggtaacgtacaacaatgtgtaaaagctttctgac

SEQ ID NO: 350 - DNA, 200 bp, Lawsonia intracellularis
taccattcatttctccttttattttacaaagtggatgttgttgaaagactggttgtagatgaagtgcataagttccaatttggatttctattcctgctttccgcatgtgatctaaaagttgatctctttgaggagtaataatacaaaagctttgccaagcatgagtgctatgactggttgtttctgggatctctatagga

SEQ ID NO: 351 - DNA, 200 bp, Lawsonia intracellularis
agtgactttaacagttctttgtataattgaacttgtgtagcccgttgtttgaggatggagtcaataagttgtatttgtccttctcctattgcagattgtatattagaaagtttataatttgtgccaagttgtataaaaatagtttctccttttagcttttttgagatatccataccaaaatgtttaatcgactggataga

SEQ ID NO: 352 - DNA, 200 bp, Lawsonia intracellularis
ttcagctaactctttattattagttgttatcattccaccttcaccagtcgtaatattttttctaggatgcatactaaatacagcagcatctccccaagctccggttttgatattacgaaactgtgaacctaaagaacaagctgcatcctctatgatatttatattggggtattctttttttatacaaagtaattcatccc

SEQ ID NO: 353 - DNA, 200 bp, Lawsonia intracellularis
agttaagaggattcccaaaaagggagacagggatgatagctttagtcttggctgtaatagcttgttttatggcattatagtctattaacatagtatttggagatatatcgacaataacagcagttgcaccaagtaacataggtgcaaatgctgtagcaggataggtatagtcaggaacaatgacttcatccccaggtcca

SEQ ID NO: 354 - DNA, 200 bp, Lawsonia intracellularis
atatgtagagcacggagaacaagttcaagtcctgttgtgcaagaagtaactcctatagcatacgatgtccctatatattgagtaaaagctttttctaatcgttgtgtgtagatcccttctgttaacacccctgaattaagaacatctaaaacattttttttggatgagtttggtatataaggtttcattaatggtattcg

SEQ ID NO: 355 - DNA, 200 bp, Lawsonia intracellularis
gaacataagttactttttacaaagattcattttggttgtttgtaaaatatttgtcctatatggttttcaggtagataagagacaacccaatggtcgcaactttcacaaggcattacaccagaaagattaatattttcatgcgcttgtcgtatactattatatgttggactattccaacaaacagctatacctttatttcg

SEQ ID NO: 356 - DNA, 200 bp, Lawsonia intracellularis
gacatttgctatatgctgtccagtaacgcgtcgtgtccagtcatgattgcataatgcgacatcaccattccaatagattaccatgtcttcaaaaactttatggcaagctttgcgagctattttagttggttgtttaagacttcctattttaccatcctttgaatgttcttcataaatccttactctatctacttttggta

SEQ ID NO: 357 - DNA, 200 bp, Lawsonia intracellularis
accaaaaatctataaaattttgtatgtcagaagcattcttttctgtttttacagcagatacttgtactactataggtacctgtcgttcttcttgtcgttgaaggaaatacaggatattatttaggataatattataatccataccacgaatttcttgatagcattttggatctattgtatctattgaaaaagacaaaaaa

SEQ ID NO: 358 - DNA, 200 bp, Lawsonia intracellularis
tctagaccaacattaagaagtttttctgtattttcatgtgttaataatgtagcatttgttgttaattggataggtccaacattatattccatcaggtattgtagtataatatcccattgagggtgcattaaactttcaccacgaaagaaaggaactactgttacaggtttataactagccatttctttaatcaactcatg

SEQ ID NO: 359 - DNA, 200 bp, Lawsonia intracellularis
agctagtgctacatccataatcccaaattcttgttccatatgatggcgtggacaaaatttacaggatagattacaataatttgttaattctaatgtgattctggatgggaaagaagacaaattcaaaaactcatacctcctttttattaatctatatatttaactttacatatataacataacttatttatattttatgt

SEQ ID NO: 360 - DNA, 200 bp, Lawsonia intracellularis
aatatttttgctggattgccgactacagttgctcctggtttaacatcttttgtgacaacagcgcccataccaattaaagcatattctccaattgttattcctcctcgaatgcaggcatttgttccaatataagctccttgttttatataacaatctccagctatactaactcctgcagctaaagatacaaaatcctctat

SEQ ID NO: 361 - DNA, 200 bp, Lawsonia intracellularis
tattgtattatgatttataatggtattttgtagtatcaaaacatggttcccaatggttgtttctgcagctatcacagaaccaacaagagctgtactcccatgtccaattattgcagagcgtgcaacataagcgtatggactaataatagataaaaattgatgatcttttaatcctgaagaacgtataatattttgttttt

SEQ ID NO: 362 - DNA, 200 bp, Lawsonia intracellularis
gtgtataattttttggacttcctatactattaacaaaaaaggtatgctgaaattttatagcatcttttaattttcctaatataggaagattatggacttttgtagactgtaacatactagaatcatctaaaaatcctacacaagatagattactatttctaatattgatatctttaatagtatcaagaatatctatacta

SEQ ID NO: 363 - DNA, 200 bp, Lawsonia intracellularis
tttcctctagcacctaaaataataatagttttatccataatatcacttggatctataaagaagttataattaaacttactatataaggttattttttaaaatacattacatttttattattttaaatatcaatataataggccataaaataaattctggaggataatatgtttccatcacgtaaaatttttataggacta

SEQ ID NO: 364 - DNA, 200 bp, Lawsonia intracellularis
gaagatatagcttctataatcgaaaattatacacttggatttaattctcttggatttgatgtgttttctgttgttaatagtcaagcttcaatatgtgcaagcccttgtgatatagtattaaaagatcatctcccaccactaagacgtagaatgactatgcgacaaaaacaagaatatatacaaaaacgaataaaccttat

SEQ ID NO: 365 - DNA, 200 bp, Lawsonia intracellularis
tagaaaagtttttgaaaaagcaataaaagagtgtgatatatttctttttatttggtccagcttttcccctgattattctgatcttccaatattaaaagcattaggtaaaaaaattatttttgtttttgtaggttcagactgtcgatggaggactgcctataatcaagatatgttacaacatggattagatattttacctc

SEQ ID NO: 366 - DNA, 200 bp, Lawsonia intracellularis
ctggatttaatgatggtgaacaacaacttaaagagattacgttaagattgattatggcagaaaagtatgcagatgcactttttaatactccaagtcaggcaggactagccttaagaccttactataattatttacaatatccgcttaatgcaaaaaaatatgagtctaataatcctcaaaataaaattccagttatacta

SEQ ID NO: 367 - DNA, 200 bp, Lawsonia intracellularis
catgctccaagtgatagattcaaaaaaggctctgatatgatagaggctatttttttacagcttcaaaaagatggcctccaatttactccacgtgttgttcaaggtgttccacacaataaagctatagagatatataaagaagtagatatccttgcaggacaacttggtactgttacaggaggaaaacaagaaagggaatt

SEQ ID NO: 368 - DNA, 200 bp, Lawsonia intracellularis
aatggcatgtagaaaagttgttgtttcagggttaaaaccagaagattatccacaattattgtctcctgattgtcctaatgtccgaagccattcattaagagatatgtacatggcacttaaaatgttaatccctaatgtttctcttcgagaaaaaatagcatcttgtggaccaagttatgtccgtacatatcatgaccctt

SEQ ID NO: 369 - DNA, 200 bp, Lawsonia intracellularis
ctactgcatgtgctaaatatcttgatgcaattaatggtactacttcacctgattttattccacgttttttgcgagatacgtttgtaccagaaaagaaatatttacctgtttataatacaagaataaagcttgtacaggactgtccttggtataaagagtatatagaaccaggaactagattaggcctagttttttaaaac

SEQ ID NO: 370 - DNA, 200 bp, Lawsonia intracellularis
tagacaataaattttatctattcgttatgttataaaatacaaatagattctattacatatttacacactactttaaggtcatcatggacgatatattagattggttaaaagaaaatactaatcatactttttctacttacgtaaaaagtaaagaaggtgcttggattttccccacacactctcccaggtcatgaggataa

SEQ ID NO: 371 - DNA, 200 bp, Lawsonia intracellularis
tgctatatggaataatacaaaattaggacaattagctcaaagaaaatattcaactactgcttgggagactgactttcttgagcaattgttaccttctttaataacctcccataacttatgtatagatataccatttatagacgtgggctgtggtgatgggaggataacatatttacttcatcgggttggctttaataaac

SEQ ID NO: 372 - DNA, 200 bp, Lawsonia intracellularis
ttgtgggaatagacttagatgaaataaatgtaaggaatgctgcttctcaaactcctagctcatctttaaataacattgtctttatgacaggtgatgcactatctttgcctttcaaacataatacattacaacaaatatttattagtgggctaccctctctttcaaacgtatttttgaatatatatccttttttaacagat

SEQ ID NO: 373 - DNA, 200 bp, Lawsonia intracellularis
agctctatgggggggggggggatactcctttgtcttacagcaaccgcattagaagcagctcttatttatgctcttactagaggagattggaaagaatttatccatattatagaaacacaaactcgtgctgcttcttgggaaaacaaaaatattcgctatcctattacaatagtagaaaatgttattaatgaagccaaaca

SEQ ID NO: 374 - DNA, 200 bp, Lawsonia intracellularis
agctggattctctttagaagctaagtatggcatccctatttttgctagtcttgtctttggtgcattatgtcaacaacaaactcttaatgaagatgataaagaactattatataatatattatatacaattccttccataaatctacattttatgagacaatcccttcttatctttagaaaacaataaaattttatatcta

SEQ ID NO: 375 - DNA, 200 bp, Lawsonia intracellularis
actataacctcttttaactaaatcaaaatataatgtatactataaccatctataatagtaataatttctaaattatgtatagcactctaacttggttaaaagaaaacactgacactacattttcttattatacaaaaagtaaagaaggtgcttggatttctccatatactcttccagggcatgaggataatgctatatgg

SEQ ID NO: 376 - DNA, 200 bp, Lawsonia intracellularis
aataatacaacactagggaaatcagttttaaacaaatattcaaccacttcttgggaaactgactttcttgaacaattattaccttctttaataacttcacataaactatgtagtgatacgccattaatagacctaggttgtggtaatggaagagtcacatatttgcttcatcgagttggttttaataagcttgttggaat

SEQ ID NO: 377 - DNA, 200 bp, Lawsonia intracellularis
agacctagatgaaatgaatgtaaattatgctgcttctcaaattcctgcttcatctttagatgacattatttttatgatgggaaatacattacatttaccttttaaacaacaatcattatcacaaatttttatcagtgcattaccatttttaacgactgttttctcatctataaaaccattaattaaacaaaacgggaaat

SEQ ID NO: 378 - DNA, 200 bp, Lawsonia intracellularis
tactttaccttacatctacttcattagaagcagctcttacttatgctttagttaggaatgattgggaagaattcgtccgtattatggaaacacaaacccgtgctgctgcttgggaaaataaaagtattcgttacactacacccatagcagaagcaattataatgtatgctgaagaggctggcttctctttagaagctcag

SEQ ID NO: 379 - DNA, 200 bp, Lawsonia intracellularis
tatggcattcctatctttgccagccttatctttggtgcattatgtcaacaacaaactcttaatgaagataaaaaagaattcttatataataaattgcatgaacttgcctctataagcaaccgatttgtacgtcaacatttacttatctttcaaaaagaataacaaactgtgattactcattcaaaaaccagtctctctac

SEQ ID NO: 380 - DNA, 200 bp, Lawsonia intracellularis
tgacgatatcaccaatgttttagcaacattattatcaggggatattagcgataataaggaacgtaaaaattttgaaaaagcaatggctaaatatgtaggaaatgcttattcagtagcaacaagtagtggaacattagcacttcagttagcattacgtcttatgaaaataggggggggggacgaaatattggtccctacat

SEQ ID NO: 381 - DNA, 200 bp, Lawsonia intracellularis
ttgtttgtgatgatattttatctgctgtacatcaagtaggggcaaaagctattcctgtagatatagatacaacaacttttaacataaacccagaggatgcagtatcacgtattacaaaaaaaacaaaagctattatccttgttcacatgtttggattaccaaatgaaatggaaaaatttcaaaatttccctgtaccaatc

SEQ ID NO: 382 - DNA, 200 bp, Lawsonia intracellularis
atagaagattgtgctcatagtttaggagctacatggaataaaaagtttgtaggaacttttggccatatttctacattttcctttcatgggctaaaactactaacatgtggggaaggaggaatgcttatgacaaattcacaaaaaattattcaacatcataaagaaatattagaaccaaattttatgactggtggttataa

SEQ ID NO: 383 - DNA, 200 bp, Lawsonia intracellularis
gttagattatcatcttagtgacatcctagcaaaacttggtttaagccagttacaatctttcccttcagttttaaaattaagacaagaaatggccattaggtatacaaaaacattaacaaatttatctcaaacatttcttcctataattaaaacaaaaaatcaaatatctagttgtttccgatatgtcttacgacataaaa

SEQ ID NO: 384 - DNA, 200 bp, Lawsonia intracellularis
cattacaattttcaactcttgaaaaaatgtttataaatcgtggtattattataaggaggccagtaaaaaatttacttcataggcttttaggattaaaagataataactatcctatagcttcagaatattttgaacatatcttttctattcctttttatccttcactaactaaactagaagaaaaaactgttttacatgag

SEQ ID NO: 385 - DNA, 200 bp, Lawsonia intracellularis
acaaaaacaattcttggctgatagattatggcaaatatcttacttacatctgttggaaatgatggtgcacaagctattataaaagcattaagaattccagaagggaataatgatatagacactctcattggtatagatagtaatcctcatgcctatggtctttatatgacagattatagttatattgtctctcaaagatc

SEQ ID NO: 386 - DNA, 200 bp, Lawsonia intracellularis
taatgctacttctttactagaagaattacaccatattattaatatacaccatattaatcttgttttaccattatcgacagaagatcaatctttttatgcacactatgcctctaaaatagagcaatggggctgtaaagtacaacattctcctgaaaagtctatcacaatagctaataataaacatctactacttccttttc

SEQ ID NO: 387 - DNA, 200 bp, Lawsonia intracellularis
tacaagaacatggtttagaagtaccatattttcgtatagctcataactgtactgagctagaaaatcttttatatgaatttgatgctaaacataatcctattgtaataaaacgagcatttagtactggagcatgtggtgtaaaaattgttatcccatcaactgatacactagaaagaatgtttgatagaactaatatttat

SEQ ID NO: 388 - DNA, 200 bp, Lawsonia intracellularis
atttcaatcgatgaattactcttttggatggataaaattaatgatacaatgccaatattacaaatatctgaatttctacctgacacaaaatatagtgtagatgtttttcttcacaatggtaaagcgattgaagcatgtgtccgcacagaagaaaagcgtatttatggcacatcattatatggtgttacaattgaagatga

SEQ ID NO: 389 - DNA, 200 bp, Lawsonia intracellularis
agaattatatgaaattggtttacaagctgcatcttctctattgttagaagggactgttaatatagagttagggaaagatagaaataaaagagctaaaattatagaaattaatccacgatttcctgcaagtattgatcatacagtaaccgctggttgtaatatgccactctgggtcgtacaagcagcattagggaaacctt

SEQ ID NO: 390 - DNA, 200 bp, Lawsonia intracellularis
ttaaagttaataagccttattataatgtgccttattttcgtcattggacatttttatctaataaaaatataccattaaaaattggtaggaaatagatgatagtacctcccaaaatgacaaaagctcaaataggagccttagaagaacgacttttttctgggaactgatctagtaaagatattgacctcttgtcttcttta

SEQ ID NO: 391 - DNA, 200 bp, Lawsonia intracellularis
tatcaacaacaaaataacatagcacaatggggacgtataactgatattaaaaataaagctaatgaacttatatatatatatataagaaaagaaaaaatcttcttgcaaaagaatgctacattttctcataagtcaggggtctatatatttccttttacaaaaaagaataactttttaaatccatcagaacaacacaatat

SEQ ID NO: 392 - DNA, 200 bp, Lawsonia intracellularis
ctttcttctttgttacctattaaaagaatctatttatgatgagcttattatagatagtaaaatctacacagaacatattgaaattgcactatttttaatagaatgttgcaacttatataacaaaaaatgtcgtattgtagataaagaactgcctaatattgtatccgatacaaatgatacaaaacaagttcaaaaaatgt

SEQ ID NO: 393 - DNA, 200 bp, Lawsonia intracellularis
taatgcttccatctgaaatagctatattaccactaactgggacctgtaatgtaaagtgtcgcttttgtgaacaagcttatacaaaaattccataccggaaaatggattttgatatattttgtcaaacaattaatgccatcccagataaaatgttcataaaagtaggtctgacaccttttcaagaacctctttctacaaaa

SEQ ID NO: 394 - DNA, 200 bp, Lawsonia intracellularis
gtttttaatcgttatcttgaatatgcactaaaaatacgtccagaagctaatatatcatttaatactaatggaacatttcttactaaggaggtaagccaatggctagtagatattggtctgaaaactattgtaatctctcttaatatgcctgatcctgtaagttaccaaaattttataggtaaaaatctttttaacaaagt

SEQ ID NO: 395 - DNA, 200 bp, Lawsonia intracellularis
tgtttctaatatagaaacattatgctgtattaaaaaacaacaaaatagtcgttatcctaaagtaattgtacaatatttgaagctacctccagttcttgggcaagaatctgtattacaacaacgatggggaaatatagctgatactgtttggtttcgtaatgtagctgctcctacaagtgatcctcaaaaattagcagcat

SEQ ID NO: 396 - DNA, 200 bp, Lawsonia intracellularis
ttaaaaaaattaatccacaattaccagaaaccagccttctaggagaagaagctctaccctgtatgagtactatggtcacctgcgctattgatatgtttggctattatcttccttgttgcacaacgcttatcgaaagatgtaattcaggcaaaagaaaatttaaatttttagaatttggtcatgttacaaacatggatgta

SEQ ID NO: 397 - DNA, 200 bp, Lawsonia intracellularis
caaactgcatggagtagcaaaaaactacaacaaatacgggcctggcaattagctggtcttattggctcatgcaatcgttgtacaagtaatcaatcaaatttagtacaactctattcattaaaaaacggtattatacaaaattgttatttacgtaatataaaaaaatacaaatagtatcttttattccaaatgcaaaggag

SEQ ID NO: 398 - DNA, 200 bp, Lawsonia intracellularis
gaaaccctactccatataaatatgttgtagaggtatccagacctaacgattgtaatgcatcattacgttcttgctgtggtaatgtcctagttactaatctacagcctaaacacattttgtttttatagagttcaaacctattatttattgtattacgtattaatgttacacgttcattatgccaaatcttatcaaggtcc

SEQ ID NO: 399 - DNA, 200 bp, Lawsonia intracellularis
cataattcttcttcagctatggaaatgtttggttcaccataacagcaatatgttatacatcttttcccttttgagtctaagtgtaaccatatatatatatatggatgaaagcaaatactagcattactattatttttagaaatatactgtaattcaatattttttgtttttgcatatgataacaatttttttaaatctat

SEQ ID NO: 400 - DNA, 200 bp, Lawsonia intracellularis
tacctttgtaatatcacaccatgaatcatctggtagtgtataatcaaacttatggacaggtggtatataaaaacctattcttacagcgttaaagccataataacttgcaacatctattaacggataaatatcatctaacacttccttacaagcaatgagccctaactgcacatacatattgctaggtttcatcttactta

SEQ ID NO: 401 - DNA, 200 bp, Lawsonia intracellularis
gtaactcaaaatttctcattgcccttttataagagcccttataaatgatattttcatatgtttttttccttatagcattttgatatatatactttatctacacattgaattgttgcagataaatttttcccatataaatttaatccatttgtatataacataatagatgcatctggagcgtatcttctaataatatcaat

SEQ ID NO: 402 - DNA, 200 bp, Lawsonia intracellularis
aatagctggatattgatgatgcattaaagcttcaccatttccacatatgacaatttcctttgtatattttaaccatgtcatccgtttaacaacttcaagaggaatttcaacaggatgatgccttgcctctttaggttaaaaaaacaaaaacgacatcgttgttgacatatattagtaagacttaaggtaacaaaagaagg

SEQ ID NO: 403 - DNA, 200 bp, Lawsonia intracellularis
tactggggggatttcaacattaatatcaccactatctaaaataggaaaagatacactcatttgagctccttttgtctatgtaatattagtgcatgatacctttataaacctaatttataattattatattctattaaattaaaatattacaatagatcacattaaattaactaattttaatttaatagaattatattata

SEQ ID NO: 404 - DNA, 200 bp, Lawsonia intracellularis
gaactaaaaggtataaatatattaagtgtgataactacgtgtaattatcacacttaatatatttatacctttacttcatagttatggataatctaatttataattatccatacataaattttatggaatgaaaaaataatatattaactagatacttaattgatattttgttttttgcatataagataacattttatcaa

SEQ ID NO: 405 - DNA, 200 bp, Lawsonia intracellularis
ttaattttgcaaaagctccattacctaaaacatttgctgcagtaatcactggatcaaataaaatataaagagctgtaattaatgataacatttctgaattaaaacctaaataactttcaagcagtggaagcataacaatgattccacctcctgggacggctacaacagaaaactttgcaaggataaaataaaaaataaaa

SEQ ID NO: 406 - DNA, 200 bp, Lawsonia intracellularis
actatataagttactaaagacggctcctctataccaaaaccttttaatatagcataagctaaaataggtattgcaaaacaatcaccaataaggtgaatgttaattgttgctggaactacagcacgaacaacatctttattctttgtattactttctaatcccataatcaaaagtggcatacttgcagcactagacatagt

SEQ ID NO: 407 - DNA, 200 bp, Lawsonia intracellularis
actaaaaccacttatcacagcaggaaagactcttttaatattattaaaaacccttataaaagaaaacttatttaataatagataacagataataatatatgtaaactgactgatagcaatcaaagaaaaaattaaagcatattctttagtaagtagttctaatataccatcatgctgcatttttataacaaatcctacaa

SEQ ID NO: 408 - DNA, 200 bp, Lawsonia intracellularis
caaataatggaacaaaaaatataaaattatttaaaaagctttctatatatatttcaatagtcactgcaagttgttctgctttctttgggaaaaatgtagatgcaaagatacctagtataacaccagtaatcattgcatcactattcgaaataatatttggtaaatgtaataaccataatgtagtaagattatctatatta

SEQ ID NO: 409 - DNA, 200 bp, Lawsonia intracellularis
tgaaattgtaacttagctaaatcagaactatatatccatatcccaatataatgactaataaaggttgataaaaaattagagcaacacacaaaaacaactattattcctataactttagtcgcatttctagatagaataacagatgctttaaataataaactaaatataatgaaaggaagtataaacaatataatagactt

SEQ ID NO: 410 - DNA, 200 bp, Lawsonia intracellularis
tatacttaagctaatagaatataaaagttgctttatatataaagggataatagggcttagtaaaactataaatataatcattattgccataataaaaggcatcttacgaaacatatttccccctttggaaatatttattatttacgtgtaaaatatggaaaaattaaatagttttaggaatgataaaagacgcttaccgg

SEQ ID NO: 411 - DNA, 200 bp, Lawsonia intracellularis
cataagccggtagtttttataaaaaaaagaggaataatattacataaagggaaaaacatctgttaacctactattatactaaaaacatctttcttaaaggagcataaacataaaagaatgtcaaaagctttttcaaaaaaaaatttgaaacttactgtctaatattattaaatctattcacagttaaaactcttatatat

SEQ ID NO: 412 - DNA, 200 bp, Lawsonia intracellularis
acttttatattttttataactaaatataatccatcacaaaatataaaggatataactgttaagtagaataaaacaatattttcccatcatcacaaactatgtattgataaaattagttgtaaaaatttaacttcccctattttaaaaaactcctgacaaaacaatataaggcatcaaaaaactactaagcaatgccatcc

SEQ ID NO: 413 - DNA, 200 bp, Lawsonia intracellularis
ttttcttaaaaagaagaaaaaagttctctttatatctaattaaattaacaaaaaattttttaattatttcttattgtcttattcccattggttatacacagttattaaattctatagaattatatatgaatagttatcaatttataattgctacctgtacctattaatatatatctatgtaaactaattaataactattc

SEQ ID NO: 414 - DNA, 200 bp, Lawsonia intracellularis
atcaactatatgtaagttaatcactaataattcctaactaacactaaatgttggatagaaagtataacctttctatttcaattccccataaattaatataagctgattctaactgagaatatattgatatttcttatcaaatcaatatgatagtatcatatgtattataaatattatataatgtgttagggatgaaaatg

SEQ ID NO: 415 - DNA, 200 bp, Lawsonia intracellularis
tgcttatcttaaaaattagtgctaactaagataggttactgagaacctataatataacttttctacatataaacataaaagattacttttttagttgggaatagtgttgggatacataaaaaatttataattagactttttaaaaatttactaataatataaatagttagaaaatatattatgtaactatatcgttggat

SEQ ID NO: 416 - DNA, 200 bp, Lawsonia intracellularis
taagaatccaagaatacaattagctaactatatacaatatatcatctagatagataatttttaatgaagccactcccgcagtatatattttacccaatcatattcccttcccaacggttacttaaaaagcctctcattcattatcaccttctacttcaaaaatatcagttacatactgtagtaataatacattcctatca

SEQ ID NO: 417 - DNA, 200 bp, Lawsonia intracellularis
ttatacatcccactaatacgacttaacacttcatctatatttttaaaatatactcaaagcccatattatacttcaataaatatataccatacgttaaagcaaataactatttatttatataaaaagtagttacttttagttagcaataatatacaatgtttttattctataaacagtttgttagatgatgttatttaata

SEQ ID NO: 418 - DNA, 200 bp, Lawsonia intracellularis
aaattatattagttgaatatgtagataacggcataaaaatacagcaagtataattgatagatacataaaaaagacagatgttatttattgaagagaactacatatcgatatctagactaataaaaacggtcaacatgtttcaatactagaaataatcattaataatgttctatttgtaaagattgaaacagaagacacct

SEQ ID NO: 419 - DNA, 200 bp, Lawsonia intracellularis
ctgaagctccaaatgaaattttaatacactatgcctttcatccccctaccatgggagtaaattctatccctttttggttagaaaacttatttaactatattttgtttacttattcttttctcatatttttttgtatacaattctatagcgtttttaatatcttcctcctgtgattctaagtacgaatctattatatgtat

SEQ ID NO: 420 - DNA, 200 bp, Lawsonia intracellularis
aataaactttttaattgttgaataatcccaattgcaagcgctctaatagtttctatttgtgacttataaacagcaaaggttattttttatttcttcttctgaattaaaattgattttccccctttctcactgtttaagctcaccttcatctataatctcactttctttatcttttaatgtatcagatgaaagattttaaa

SEQ ID NO: 421 - DNA, 200 bp, Lawsonia intracellularis
ttctcaagagttaaataacgtatgtaaaaaaatacaatagagcttattctagccatttttatattatataagatacataattttgttatactttttacataaatgactactgacagtaatcattagtgacattttcttttttttcatgtaataattaacctaacttatagatttcttaggggagaagtaatgatgttagg

SEQ ID NO: 422 - DNA, 200 bp, Lawsonia intracellularis
tcgcatgttaggtagtctattaggaaaattttttgataaagtttttcctgaccgctcaacacattgaagttcaaagtacagttaatgaagcagagctttaaggtatacttacttctatccttagtttatgaagaaactttttaggatgggttttggccattgctttttcctgggaagaaatagggcaactcatggtcata

SEQ ID NO: 423 - DNA, 200 bp, Lawsonia intracellularis
ccagtgtttctcctgatatagggaataaactcttaaaatttcaattaaagcagattagcacattattgctaggaaaatgttaaggttaggatggtaaagtatggatgaaaaaacaggaacaatgtggtctaaagttaagtatggattagggaaagtgttcataggtctttctgtctatttagttgtttctgtagtcacag

SEQ ID NO: 424 - DNA, 200 bp, Lawsonia intracellularis
cattattcaccaatctcatcttattaaatcgtatggatgaacgtgttcaagctatagagtattcttataagcaacaggacaaaaattttgcaagtgatttacggagttatgagtcttggttgaaagcaattacacaaaaggtagatgtattacaaccacgtgtgatccaagtagaagctagagttgagtatacacaacac

SEQ ID NO: 425 - DNA, 200 bp, Lawsonia intracellularis
tgtcttgaagaattaaaaaagaggttgaattgatataggttgaaagtagtttgaaaatgctacgaaaaaatgtgttaaggtagtctttgtaatgtattggtggcgtgtaaattcccaatagaatagagttgttactgtttattatcaatcatctgatctagttgcatatgagtatccctttgattcatatgtaacttatt

SEQ ID NO: 426 - DNA, 200 bp, Lawsonia intracellularis
ttcaaagactcctcatagacaaaaagtctatgaaaatatcttcaaaaaagaaggtgttttttagaaaatttattattaaacgtatcctccctctttgtactttagagcttaagggtaaaaatatattatatgatactgtcccccgtaagtctcttagtataattttttgaatttgattgaggataaagtcaagatattat

SEQ ID NO: 427 - DNA, 200 bp, Lawsonia intracellularis
aattggtggtgacatgaaagagattataaatggccttttaagccttattgttttattgatttgttctccgatcttattaatatctatacttatttttttattggcttatttttaatatttttttctgttggaataatatcaatttcaaatattattttggaacattttcaaaaatcaggatagctgtgacagattataca

SEQ ID NO: 428 - DNA, 200 bp, Lawsonia intracellularis
aagaactatcttcgtgcaaagaataaatattttctggaatgtgttagacagtctaaaaaaaaaaaaagcaacatatcagaccaaataataatcatatttcactagctttcctgtctgttgaaattctttcttctttgtaagaacagatccataagaagaatcctcaagctcataaaataattgctgtacatgcttttcaa

SEQ ID NO: 429 - DNA, 200 bp, Lawsonia intracellularis
cttcttcctgtgtttttacttctcctcttttaatttgttctgcaccttcatatttaatatagctacaatataaacattattgcttataagtaaaagttttaaaaggattataagatattagacatagctatattaccaaaacaacctgaaagtatgactttgccttttactacaactggttattatacaggagttagccc

SEQ ID NO: 430 - DNA, 200 bp, Lawsonia intracellularis
tgctgagaacgacagatatacagctgataattcccttctgttgagtctacatgagatggtaattgaccaaaatggacaggtaatacatgaatctaaagaaagattcttatgctcaagaaaactgacctaagggggcaacctataaaaatttgtctcttatatgggagcaagcatagagcattactagggggagctataac

SEQ ID NO: 431 - DNA, 200 bp, Lawsonia intracellularis
aagccaaataaagaacaaaaagatatattaacaaaacaaataaataaaatgctgttaaaattgtaggatataaatattgatattcgctagttagagaggaaagtgattagaataacagtaataaataatgataacagcaagttacaagagttaaatagaaatgaagaggttattaataaactaaatgtattatgatttta

SEQ ID NO: 432 - DNA, 200 bp, Lawsonia intracellularis
actgattaataaaactaaataataaattatactataaagttatctaacggtttataatacgtttgtaataatctttataagtttgataattcataataagaactaaaaaaaattattatcgtataatttattatttaactttgaataaatacaatacctgttatctaacaacttaattgtctttttgtataattttttat

SEQ ID NO: 433 - DNA, 200 bp, Lawsonia intracellularis
tgtttttatagatattaaatagttacttattataataagttgttttatatactttctagttattcaatagtagctattgctatatttaatataatagtattattgacttaataagtaatatataatattatttgatatattttaatctagttctagtcaataaaaaatctttaacaacgcactagagtaactagtaaaat

SEQ ID NO: 434 - DNA, 200 bp, Lawsonia intracellularis
ctgacaccaaacaagtgttaattacttaactagctaagctagttagatagttttttgtgcttttggtaacactaaattaaataaaatgacaccataagaaataatatatatccttttcttcttttttagaaagaagaagtttttaacgatagtaaaactatttattattaatactaactataattaatctattattaaga

SEQ ID NO: 435 - DNA, 200 bp, Lawsonia intracellularis
tataacaaaatattatacatttttttttataaaaactaggttagatttataaatctatataagtatgattcatctatttaaagatattaataaacatttttttacaattagtttaatatacacatatatatatataagcataattatacataatataaaaagtatagttaatatagctatattatctatgttttctattc

SEQ ID NO: 436 - DNA, 200 bp, Lawsonia intracellularis
ttatatgttatacaaatgctttttgtataaataatacaaaagaatctggtggattaattaagcataatgtacgagcccaaatagcagaagaaagaaaaaaggcaaaagcagaaggacgacttgaagaattcgaaaaaaatttgaaagcaaaaagagccgaagaacaaaaacaaagagtcgcagcttggaaagcaaaaaaa

SEQ ID NO: 437 - DNA, 200 bp, Lawsonia intracellularis
agggaagaaaaaaaattatcacaaacagaagaagaaagaaaaaaaagcgaagcacatagaaaaggacaattaaaacgcattgaaagaaggcaagaagttaacaaacggatagaaatagccatcagagaagggaacgaagatgaagttcggagaacaatttctcaagaagaaatacaaatcaaaaaagaaagagatttaaa

SEQ ID NO: 438 - DNA, 200 bp, Lawsonia intracellularis
atataaagaagaaaaaaaagctaaaatattgataaaaaatcctccactaacagaatttgaaaaactacgtagagtagctattagtgaaactcaaactgaacgtcatgcaaatgataaaatattagctaaaaaagaagaggaattaataaaaattgagtcagctgatattgttaaagaaaaaatcaaaagagaaaagttac

SEQ ID NO: 439 - DNA, 200 bp, Lawsonia intracellularis
aacgtattaaacaaaatagagcaagatggagttcaaaaaatagagaaactaaaagagcagaactatctgaagaggagagaaaaaaatcagaagcacgtagtcagggacaaaaagaacgccaacagcaacataaagaaataaagaaaaagcttcaaaaagcattgaaagaaggaaagttagaggaggtaaaaaaggaaata

SEQ ID NO: 440 - DNA, 200 bp, Lawsonia intracellularis
gagcttagtaagttagaaagaaaaaaatttttaaaaaacagacaattaatacgtaatgcgacaaaacatgcagaaaaacaaatggcaatgtggttatctttaccagaagatgaaaaaaatcgtaggatgaaaattagtcaacggtgctcagaatatcattcttccatgaaaaaaataaggaaaaagtctaaatctgctga

SEQ ID NO: 441 - DNA, 200 bp, Lawsonia intracellularis
agagtcagggtgtatggaacaatttttagaagcttttagtgaagaattacaacttaaggaggagacagttaaaaggaaaaagaaaatacaaaaagaacaaaaaaagaaaaagaaaaaagaaaagcagtcaaaaaaacaaaatatagatacaggtcaagaaccagagcctccattaatggaggatgagtattgttttcttt

SEQ ID NO: 442 - DNA, 200 bp, Lawsonia intracellularis
taggtgatcttcaaccatcttttttaccatctgaagaaatactcttagagccagatcaaacttttctattagatttagaaacaattgatccatcaagcttagatctacaaatttttcaggaagaaagtactagtacatatagggaaatcgcttttagtaatagtaattctgagggtgataactctaataatataccttct

SEQ ID NO: 443 - DNA, 200 bp, Lawsonia intracellularis
ctaaaagacaatgcattacaacaatcagaagaaatacaatgtacagagacagctatttctgaatgtaataatactattaaagagttagatttgatagaaggagattctatatcttctcagcaacctaaggggaaacagtcttcattaacagcaagtattgtaataaatcaaactcatagtaacgaattacaaatattatc

SEQ ID NO: 444 - DNA, 200 bp, Lawsonia intracellularis
ttatattgatgggtataataaaaaatcacaactatcttctttaaaaagtttacaaaatcttttttatagtcctaaggaacaaatgttagctaggctaaaaacttttgttttacagagtagctttatgccaagtgatgttaactattatgaatatgatagtgaagatagtaccaatacaatgctacaatatccaactatgc

SEQ ID NO: 445 - DNA, 200 bp, Lawsonia intracellularis
tttctaacatagttaaaaatagctgttcaaatctcaaacagtataatttttttggttatagtaaaaataatagtaaaaacttagaacttaaaccatatagttatcaaataggtattattacaaatataaaatcaggtttatctctctcattggcttacaatcgagataaagataaaatttcttctttttcacatatgata

SEQ ID NO: 446 - DNA, 200 bp, Lawsonia intracellularis
atggagtcattttgtagtcctgcacagtcaactataagttcagattgtctctcaagcctttttatatgggatcccagctattcaggatttaagggatatatagttagtgcttatgggtgggggcaaatgaaaaatatacgctatgcaatacataataaaaaagaaatttgcacaaaaggggagactaccgttaccatata

SEQ ID NO: 447 - DNA, 200 bp, Lawsonia intracellularis
tggctctctttatcggttaggatataccttccctttgggaaagagtataatgtttacaccatatatagagaacagttttgtgcagatagcatgggaaagttataatgaacattttggtgttcttccttgtaaaattagtagttataaagagaaaatgtatgaaaggaacataggggtacatatttcttggacagataacg

SEQ ID NO: 448 - DNA, 200 bp, Lawsonia intracellularis
actgttctttattacaagcatggactgtaataaataataaaaggcatatatcaagtaagatagaagcaattccacttagttcacctaagtcttttttttatttatctcagatcccaaaaaataaaaaagaatatactcaaaaagaaattgggatatcctataaaaggaaaattatagaggaaatggctattacttttgac

SEQ ID NO: 449 - DNA, 200 bp, Lawsonia intracellularis
agtaaatttttctatgcaaaacataataatggaaaagaagtggaatgtagtattcattatatcttttaatatagtatttacctaacaatagttaacttataaaaataattatatatatatatattaaatagttaaaataatagtatcctgtgtattaatatgctttttaatcaaggttttctcaatgctatgtttagcta

SEQ ID NO: 450 - DNA, 200 bp, Lawsonia intracellularis
aacatcattgaaagatataataacctcctggatatcttgttttatgtcttgttatttttggtataataaaaacctggggctgtttattttactattttgtttttattttattttttaccctattaatgtattaacaatctttcacatagacaaaaaaatatgtttttggaatgatcatccaagaatacaattatctgatt

SEQ ID NO: 451 - DNA, 200 bp, Lawsonia intracellularis
tttttatcccatataaacagctccaaataaagggataggataaaactaattagtataaggtataaccagctgtatgccaaaaataacaagacataaaacaagatatccaggagtttattatatctttcaacgacgtttagataagcatggcgttgagaaaacgttttatattctttatagacgatgtggagaaaaaaaac

SEQ ID NO: 452 - DNA, 200 bp, Lawsonia intracellularis
ttattgaagaacctgtaggccgtgaatcatctggaatgactgcagcaacagcaaataatattcgtggacttcgggctattgggaaagaactttctaatgttgaaaaaagaaaaaaagaaaaagaaaaacaacaaaatcaaaaagttacattgcaaactatttgggataaatatcaactaatttactcagaaaaaaaatcc

SEQ ID NO: 453 - DNA, 200 bp, Lawsonia intracellularis
ttaaaacaggatataagtagagtaaaatacttatctgatttaatgcataaaagtcctgatatccttacaacaaatgatattgatacgctgagaaaaaaattaacattaacaaaaagttctaaagggggagcaagcttatcaccagcttcaataaaacatattttagtattacttaaaaggttgatcaactttggtattca

SEQ ID NO: 454 - DNA, 200 bp, Lawsonia intracellularis
aagaaatttatgtataaaaccacaaaatttatatattgatatgccaaaggttgataatcaaaaaacagaaattctttctaagaatcaattaaaaaatcttctacttgcgcttgatgctgaacccaaccagtcagatgttgcctttattcgtttagcactagttacaggaatgagaaaaagtgcattattagctcttaaat

SEQ ID NO: 455 - DNA, 200 bp, Lawsonia intracellularis
ggtctgactgtgactttgaaaataatatcattacactttctgggaattatgcaaaaaaagggaaaacagattatattcctatgaataactctgcaaagtcaattttattatctatcccaaaaggaaatagtgattttatttttgcaacacgtaatggaacaaaaagaacaacttataatcagcggttaataaaaagaata

SEQ ID NO: 456 - DNA, 200 bp, Lawsonia intracellularis
aaagaaaaagcaaaattaccaaaagactttagaccgcttcatgggttacgtcataattttgcctctaggttagcttcaagtggaaaagtagatttgtatactattcaacgactactaactcatgaaacacctgctatgacacaacgatatgcacatctacataatgatgcattaaaaaaagctgctgctattattgatga

SEQ ID NO: 457 - DNA, 200 bp, Lawsonia intracellularis
tgaatttacggaaacattaagttagacaacatacatttattataaatgtataaaatctataatttttatgtacatatagttgtatatatcattatactataaaatatactatattaattatctgataatatacctataaaataataactgttgttacagcttatgtaactttaactgactaatatataaaaaatgtatat

SEQ ID NO: 458 - DNA, 200 bp, Lawsonia intracellularis
gatatattattatatattaaaaataggttaattgtaattaataatagtaaaaaaaatactcatcaaatttttaataaactatttctcttttttcttaaaaaataagacaagatatataatatccatttaagtgatacttaatttattttagtgttaccaacaaaataaaaaactgtctaactaagctaatcaacttaata

SEQ ID NO: 459 - DNA, 200 bp, Lawsonia intracellularis
tccaatcatattaactctttttatcaatatgtgaatattagtcgagcaaaataaaaaatttttacgtactatacatatactacatattatacatataatatagacagaatgtctacattgtataatatatataatatgtagtatatttgttatatgtagtatatgtatagtacgtaccatattaatagtactttacatat

SEQ ID NO: 460 - DNA, 200 bp, Lawsonia intracellularis
agactatatataacatatgttttatactaaaaaacatacatcataaaataaaaaaggatatattttgtgaaagaaatcatagcaattattaatcaaaaaggtggcgtagggaaaagcaccacagcattagcattaggagctggcttaattaatagaggatatagcgtacttttcattgacctagatgcacaagggaattt

SEQ ID NO: 461 - DNA, 200 bp, Lawsonia intracellularis
aacacatacactagggattcaatctacaaacttaacttctgtagatctattagcaaaacgaatgagtataaaagaagtcctacaagatacaaaaaaaggtactgtaataccagcaagtccaacattagcaggtgcagatactgtaataactgatgtaggaaaagaatatagactaaaagaagcattaagtgatgtattaa

SEQ ID NO: 462 - DNA, 200 bp, Lawsonia intracellularis
acgactatgactatgctgtaatagatacgcctcctgcattaggagtattaacaataaatgcccttacagcatgttcaagtatagtcattcctgcacaagctgatatttatagcttacaaggtattcatcaactccatcagacgatcagcacagtaaaacaatattgtaattcaggactaaaagtaaaaggaattttactt

SEQ ID NO: 463 - DNA, 200 bp, Lawsonia intracellularis
acacgttacaatactagatctatattaagtagagaccttactgaaattatagaacaaactgcacaaaaactagatacaaagctgtttacttctactattcgagaagcaattgctataaaagaaagtcaagttcatcaacaagacatatatacatatgctcctaaaagtaacgtggctttagattatgaaaattttgtaga

SEQ ID NO: 464 - DNA, 200 bp, Lawsonia intracellularis
agaatttttgagaaggaattagttatatggttaaaagaaaaaactttaaaaataaccctgtattacagtttattagtacagaacatatagaacatgaagataacaatgatcatatagataatcttcaacatacagatgttgatgctaaaactaatcatatagaatatacgaaagatacacatgttactcatagtgaaacg

SEQ ID NO: 465 - DNA, 194 bp, Lawsonia intracellularis
gatcaaaatagtatacctaataaccacaaatcaaaagaaataaaaaataaaaggcttactgtactcctaaaaccatcaatttttgaaaatgcagctaaactttcaggattaaaaagaacaagtgtaaataatacaatcaataaagcattagaagaatatatacagaaacatgaagagatattaaaaaaatatga

SEQ ID NO: 466 - DNA, 200 bp, Lawsonia intracellularis
atatcttagttatattgttttctacttatcttattatttatactaagtggggtaacttatgggaaatattgattaattgtcaatatatttttatatataacaacatgtctttaatagattgttagtttacctcctctagttaacttaatcctgattaagttaactagaggaggtaaagaacagtagatattattcagatt

SEQ ID NO: 467 - DNA, 200 bp, Lawsonia intracellularis
gtcagtaatggcttggaattaaagagaattttttataagaaaaaatgtacttcaaaaaagacgtataaagcatttttttatacaatacaggtaaaaacacctgtgaagaaaaaaaaaggcttatacccaaaatatgaagctattttgttttacaactagaaactttactcatatccagttttggataacatatgtaatag

SEQ ID NO: 468 - DNA, 200 bp, Lawsonia intracellularis
aatatattgtttgtctaatagatatattgtagataatgttttctgttgaaagagttctatatttttttagcatttttagtaagtaagatagtaaaaataggtaatattgcagtatagagaacgtatgaaaaattatttttcttcagatacacaaggaaagcttattgggcagatttcatcagatgtacctttgttacata

SEQ ID NO: 469 - DNA, 200 bp, Lawsonia intracellularis
ccttacaagaagtggaacaaacttggagtcctcttagtataaaaagaatattagtacatttcagatctagtcgacaatatgaacgtgttattgattatattaacattcaagaagacttattacctaatgagcgtgttattttattctttttacatgcagtctatgatgattcttttgctactatggaattatatgcacgg

SEQ ID NO: 470 - DNA, 200 bp, Lawsonia intracellularis
tatattactgatcttataaattatgtccaaaaagactttcatcatattacttcacaagatgtagacgcatttattcgttacagacaacttaatggatcaaagcctgctacaattaatactattataggcgcattaaaaagtttttttcgtcatttagtagatgcaggtattttaacattgaatcccactgcctttttaaa

SEQ ID NO: 471 - DNA, 200 bp, Lawsonia intracellularis
gaaaaggcgtaatgatactaaacaaaatttaccaggacatctatctcatagtttaagtgaatcagagttacaacgtctttttgacgggatgatagaacaaggcgcatcattacgtgatcaagcattaatgcaagtgttgtttcttacaggaattcgtgcagaagaagctgtacgtttaaaatggagtcatatagtaacat

SEQ ID NO: 472 - DNA, 200 bp, Lawsonia intracellularis
ggcaatcaagatggtatttggatgtatttgggaaaggaagtaaaagacgtagagtgtatttacctatacaagcacttacagttattcaagagtatggcaaactattgggcattgaattaggattagcaagtaactcaaaacccctctttgctcatttacggagacctaatgaacatattagtcggcatggactctatgta

SEQ ID NO: 473 - DNA, 200 bp, Lawsonia intracellularis
ttagtaaaaaaatggtgcaagagactgttaggtagaacggacgtttctccacattggttccgtcatagttgctttacccaacttgctcataagggtgctagtcttgagagcattaaagctcttgcaggtcatgagtctgttgagacaactatgcaatataatgaagctgcacaattaatgcagcctgctggtattctatt

SEQ ID NO: 474 - DNA, 200 bp, Lawsonia intracellularis
tgaaaaataaaaacataatatatattataactatttaactatgttgcaataattattcaatattttttgagaatatgcagcttcactattaaagtctagattataaaattgtcctttttcattgtatggtgaagccttatgtgaaaataatgtgaaacaatctgctattggacttcttccccatgtgatgatttcttgac

SEQ ID NO: 475 - DNA, 200 bp, Lawsonia intracellularis
aaataatttttcctccatattgcttaattaaataagcaacatcagcagcagaaacatttgggtttctataatgtggattctcctctaaagtagccagcgagtctgcaagagtcattttaaaatttgaatggtgtataaaacatacaccattagatgtaagtaactgtgtaagtatttgttggatatatgcattaagaaca

SEQ ID NO: 476 - DNA, 200 bp, Lawsonia intracellularis
tcaagatctacatggacaagagaatcaaaagaaaaaataaagtcatatttttggtaagcagctgcttgaagagataacccatcgtttacaaaaaatttacaatttttataccatataaattttttttacaatgagctatgcaaggagaagctaaatctataccacaataacttctataaggataagatagaagaaatttt

SEQ ID NO: 477 - DNA, 200 bp, Lawsonia intracellularis
gtccagcgtccaaatcctggtgcaatttctaaaatactatttttagggataaaagaaaaaagaaattttgggagctgattagagtgaagagattgttttaaggctattttttcaggggaaaaagggtgaatacgtggtaaaatagttgtaatccattgagattctgaggaaccccactttttagaccactcctcgccttc

SEQ ID NO: 478 - DNA, 200 bp, Lawsonia intracellularis
ttcagaccattctttattattccagactgttttattccaaccaatatcgccaaaagtatgttccaatgtactctcctacagatggctcttaaggaaagagctgccttatgttgtagtgagtagccagtatatatatatatataggttaaaacaagtaaaaataatctatctattttattgattatacttcaaatttttat

SEQ ID NO: 479 - DNA, 200 bp, Lawsonia intracellularis
gtctctattttatataggatctttctttatttctaacataatagaaggattgaattatgaaaatattgactcatgcacagctagaagatgaaggatttttctttgactctggttttcgtggttggatttcttctcatcatacccttctaaatacaaaaggagaaccagatcacacagataaacatacactagagaattta

SEQ ID NO: 480 - DNA, 200 bp, Lawsonia intracellularis
gaaattctttgttcttatatgaatcaagaagtaccaaatattcttacagaaatacaaggtgttcggagcatattcccagaggtaaaaaaaagctgtcttgaggccaaacaacataactttggtgtttctgttcgatatggtgatcctcaatttatgagtgctggaggtacattatcttcaagagtacatttcatatatga

SEQ ID NO: 481 - DNA, 200 bp, Lawsonia intracellularis
agtacaacaacaagttgctaaaggaatctacgactatatcaatgaaatatacctttttggtattggaggaagaaaaatatatggattattaaattatcctacactatttcaacccattgcaccacttcctacaggagaaaattcgtctcctttgtggtccaaaaaagatgtagaacaatggtataaagatattgatgaat

SEQ ID NO: 482 - DNA, 200 bp, Lawsonia intracellularis
tatataagacacttcaacgtcaaacctttaatcatgtaacgcttgaaactcctacagttctttgcatttcagctcagttagatacttatttaggtcaaaaacataccaaaaaattgttacaacagatggtaaatgaaacatatccacgtttacaatttgtaactattgatggcttatccatatctgggataggtgaatct

SEQ ID NO: 483 - DNA, 200 bp, Lawsonia intracellularis
atgttgcttattgcaaaagaattacacggtaaaaaaacaggagaatttgtgtatagtgaaagattaagaacatatcctgttatccctgggaaagaagaactaacacaaaaatggtcggcaagtacctatggttgtgtgattcatattcctgaagctatagcttatatgagaggactctaaagatgacttaaaagttagag

SEQ ID NO: 484 - DNA, 200 bp, Lawsonia intracellularis
ttgctgattaatgataaatgattatataaagcatatgattctaatacgacattgtaagtttattatccatatgaaataacaataaatataaaatatattctattcactgctgtaataattattggatagaactcctctggaggaggatgagttatgtcgccacgaaaattacatgtgcttcatataacatcaagagctga

SEQ ID NO: 485 - DNA, 200 bp, Lawsonia intracellularis
ctttggtggtggaccagagcatgtctatcagattttacgacacagtccaggacagtggaacaattttgttgcttgtcctttagatagaccatatgctgaacgatataaaaatctattaggaataaatggcatttgttttattcctcatagaaagttttcagtaaaaaccctatgggatcttagacaattcatcaaaaaaa

SEQ ID NO: 486 - DNA, 200 bp, Lawsonia intracellularis
atgcaatagatcttattcattcccacggtaaaggtgcaggtgtttattctcgcttattacatgtattaacaaatattccttgtgtgcatacgtatcatggttcaaatataaactcatattcagcagtaaagtctaaactttatagactctatgaacagcttatgggtaatgttacacaacgtgctattgttgtttcgcca

SEQ ID NO: 487 - DNA, 200 bp, Lawsonia intracellularis
agtgaacaggaatatgtgttacaagaaaaattaattcccacagaacggcttacttatattccaaatggtgttgtttttcctgaaaaaatagatacagaggaaaaacatgagcgttttcaaattatttctattacacggtttgataaatataaaaatacagaatttgtcattcctattctacatagattaaaagaagaaca

SEQ ID NO: 488 - DNA, 200 bp, Lawsonia intracellularis
acaaatacatcaagtccaactagtgttaattggtgatggacctgagaggaaagtacttgaagaacgattaaaatcagaggatctttcacaatatgttatctttacagggaatgtactctcttcagctccctatctgcaaaaagcaaatgtatatttaagtacgtcatgctgggaaggtatgccattaggtgtgttagaag

SEQ ID NO: 489 - DNA, 200 bp, Lawsonia intracellularis
ctatgtcttatggtttacctgtggttgcttcagatgttaaaggtaattgtgatgctgtagaacatgaagaaacaggattcctctatccttacaataatgcctatgaagcatctaaggccttaatttgtttaatgaattctcccaaaatggtaaaacagttcagtcaagctgctagagaacgtgttcgaaaattttactct

SEQ ID NO: 490 - DNA, 200 bp, Lawsonia intracellularis
atacaacaaatgattgcttctcttatgcttctttatgatgatattgcaaaacaacaatatctttctttataactttaattattaacgtgtagttttttgtttatatttttaaaacgtcttcttttttcagaatgcttctattatactagaacctcctgatctatccagctaatagatattaagcctagtaaaaatagtgg

SEQ ID NO: 491 - DNA, 200 bp, Lawsonia intracellularis
atagatggcttgctcttttatattgaatcagataactagttgaaactatattaaatactattgtttaatcttatttttttagttgtctttataagagctaatggagaatctataatggaagtggaaaagacgtctttagaaggcgtattactgattaaaccaaaagtatgggaagacagccgaggatactttctagagac

SEQ ID NO: 492 - DNA, 200 bp, Lawsonia intracellularis
atggaataaacaacgctatattgaaattggactacaactaccctttgttcaggacaatcattcttcttcaacgcttcatacacttagaggtcttcactttcaacaacagtatcctcaagggaaacttgtaagtgtctcattaggagaagtttttgacgttgctgtagatcttcgtataaattctcctacctttggatcat

SEQ ID NO: 493 - DNA, 200 bp, Lawsonia intracellularis
ggtttggtgtgattctttcagagaagaatcattatcaaatgtggattccaccaggcttagctcatggtttctgtgttctttcagaacgtgcccattttcactataaatgtacggaatactattatccacaagatgaaagctgtatttgctggaatgatccagacattggtattgattggcctgtacagcatccaaatctt

SEQ ID NO: 494 - DNA, 200 bp, Lawsonia intracellularis
tcacacaaagataaaatagctcaatcttgggcagattatgttgcttctataacatagtcttcttttgttataaagaatgaatattgtaatggaaggcatggtaataggaccatgtttagaatagaactatatctaatgactaatatctgtatgaaaataaagctagataatcttttttatcagaaagacaatgagtagag

SEQ ID NO: 495 - DNA, 200 bp, Lawsonia intracellularis
ttgatatgtctaagtagaacctttttatcaggtggaatttatggtaaatattttttattacctctggcatcaacgtagaaatgtcttaagacttgttataggagattttacacaaaattatctttcctcttaccttggctttatttgggcatttttaggaccattggtaacactttctgttttagctattgtatttcaag

SEQ ID NO: 496 - DNA, 200 bp, Lawsonia intracellularis
taggctttagagttcctcctattgatgtaagtggtgtcccttttgttgtatggctagcctgtgggatggtcccttggctttatattgctgatggactaacagttggtgctagttctgttacctcttattccttccttgtgcggaaagttggcagatttcgtctggctattcttcctattattcgtttagctgcttctggt

SEQ ID NO: 497 - DNA, 200 bp, Lawsonia intracellularis
atcatccactgtgtgcttgttctttttttacttatccttttattttattataatataagcccatctctttattggttgcaattccctgtatatcttttttttctctatctattgcttttaggtgtagcactatttacttctgctatttctgtttttattccagatattctcaatttgctaagtattattatcaaccttgg

SEQ ID NO: 498 - DNA, 200 bp, Lawsonia intracellularis
attttggggaacacctattctgtggcatgcttctatgttgccctcttcttggcattggatctttcttgttaatcctgcttactatatagttcaaggttatagagatacgtttcttgaacaacaatggatttgggaacgtccactagaagagcatatattttttgggctttggttagctatactctttcttattggtatat

SEQ ID NO: 499 - DNA, 200 bp, Lawsonia intracellularis
atacatttaaaagacttcgcccacactttgcagacgtcctttaacgtatttgaagagagatttatttgtcttcttttaaagtaacgatgtccctatcatgaaagatggatagtttcttataagaaataatagatgacaacaaagaatatcttctatatggtgaacaaactaacatgtatacgaaaggacagtagcctatc

SEQ ID NO: 500 - DNA, 200 bp, Lawsonia intracellularis
tctttgacattatttgagtatattcattattcatgactcaatacgtatctattatcactacaagctataactatgcagcgtatctagctgacactattgaatctgttattgctcaaacctatccatattgggaactcattattgtagacgacggctctacggatacgtctcttgagattataaaacaatatactgaaaaa

SEQ ID NO: 501 - DNA, 200 bp, Lawsonia intracellularis
gactcacgaattcatcttatacaacatccagatggtaagaattatggactgccaacaacggtctatcttggtatccttcatgcacaatatgactatatagcttttcttgaatctgatgatatgtggacaccagatagtcttcaagagcgattagttgtaatgaataaaacacaagcagatgttgtttttaaccagtgtaa

SEQ ID NO: 502 - DNA, 200 bp, Lawsonia intracellularis
acccattggcgatgtgacatctgtatctagagatgttcatggatatttatcacttattcatgaaacaatgtctcaacttaccccacctttttctttatttacatgttatctaaccacaactaatttaattcctaccttctcttgtgttcttctaaaaaaagcacctctacttcaatgtacttttacaccaccacgaccat

SEQ ID NO: 503 - DNA, 200 bp, Lawsonia intracellularis
cttggttagattattggctctggtctcaactttctattggttcaacctttgcttattctcctaaaccccttaccctttggcgtattcatccatcaagttataatacacaaaatgatcagctttttaaaaaatgttggatgccattctatctatctgtgtgttggaatatgacaaaacaagcgtttaaacaatatccatat

SEQ ID NO: 504 - DNA, 200 bp, Lawsonia intracellularis
cagatccataggtatataataccttttctatatatggtaaaaacctggtctgtacattctccatttatttcttggttaaagccaatactccaacgttttagaaaacgttatagtatgtagtaaggtatggttatatgctttaaactacaacttttctttatgaaaattatctattactaaataattttaattgttttgta

SEQ ID NO: 505 - DNA, 200 bp, Lawsonia intracellularis
gttagaataaaatttttttattggaaaaaacatatatgaagtatatacgtcttataaaaaaattttttattatatataaaaaatatgggttccaagcagcagctataaaaactagacaatattttcgtaaatttctaccaagttatgctgtttcttatttcttacctacgattccttatgaacctccatatcctatagat

SEQ ID NO: 506 - DNA, 200 bp, Lawsonia intracellularis
ccaaaagttactacagatatcaagcttattgcttactatttaccccaatttcatcaatttcctgaaaatgatgaatggtggggaaaaggatttacagaatggacaaatgtctgtcgttcaaaacctatgtttgaagggcatattcaacctaattatcctcatcctgacataggtttctatgacctttcaaatatagaagt

SEQ ID NO: 507 - DNA, 200 bp, Lawsonia intracellularis
gctacgtaaacaagtagcaatggcaaaacaacatggtatttacggattttgttttcatcattactggtttgctggtaagcgattaatggaaaagcctgtagatatgctccttaagcattcagaattggatatccccttttgtctgaattgggctaatgaaaattggacaagacgttgggatggtgaagatcaaaaagtat

SEQ ID NO: 508 - DNA, 200 bp, Lawsonia intracellularis
taattgctcaaacacattcaccagaagatgatattgcgttcatgaaagatttgttaagatattttaaagatcctcgatatatccgtattaacaatcgacctgtattacaactatatcatgcatcattgcttccagatcttaaggcaactgtaaaacgttgggaagctgtatgtaaagagcatggcgaagaaaagccctat

SEQ ID NO: 509 - DNA, 200 bp, Lawsonia intracellularis
cttatgcttgtacaaagctttcgaaacatagacccacaagactatgactttgatgctgctgtgcaatttcctccccatttaccatcttggaattttcctattgatattgggttaaagggtcttcataaacgttttaaaggaagaatacgacactatagtatgtttgctgaggctgttgtaaaagattatactacaaaata

SEQ ID NO: 510 - DNA, 200 bp, Lawsonia intracellularis
tacattgtatccttgtgtttttcctgggtgggataatacacctcggcgtctttatttttcaagtatttttgcatgctcaacacctcaagcataccgtcaatggttaactgatgcatgtacatttgcttccacaacacatgaaaaagacaatcgttttgtatttattaatgcttggaatgaatgggcagaaggagcacatc

SEQ ID NO: 511 - DNA, 200 bp, Lawsonia intracellularis
ttgaaccaaacaaagcttatgggtatgcatatcttaatgcaacgtcacgtgttgtggaaaattttgcagtacctccttctacagcagaaaacaatcctcataaagtattagtagtaggacatgatgcatttcttgctggtgcacaacgattattacttgaaacattacagtggattaaaagaaatacaaatatagattgt

SEQ ID NO: 512 - DNA, 200 bp, Lawsonia intracellularis
aggcttcttttacttggtgatggtgttttattagatgaatatatgcagtctgtacctgtgatgctatgttcagcagatacattgcagttatcaaagctagaagatttttgtggagggattccagattgtattttaggtaatacagctgtttcagctcaagtatataacatgctttcttcatggaatgttcctattgtttc

SEQ ID NO: 513 - DNA, 200 bp, Lawsonia intracellularis
atttgttcatgaacttgaagcagctcttcaacgttttgcaggtgagcaaaatattgcttctatgttgaaatattcaagttattttattacagcatctgaaccagtacgacaaaatcttatttctactcatggagtgaatccacaagattgtataacaatacctgcgtttcttgagccacgtctctatccactatctcaaa

SEQ ID NO: 514 - DNA, 200 bp, Lawsonia intracellularis
aaaagaagaaacaattacgtgagtcattgaatcttccacaaaatggttgtctttttatgggatgtggaaccagagattggagaaaaggttttgatctctttattgaagtagctataactacattaaaaaatacatctcatgagcttcctattttttgttgggtaggaaaacaagaagtaccacttctccactcttctcct

SEQ ID NO: 515 - DNA, 200 bp, Lawsonia intracellularis
ttatacaaacagttaaaaaaagatatccataataatcttatttttatagatgaagttgaaaatccaggaccatactttcaagcttctgatgtatttttactgccttctcgtgaagatccctttccacttgtagcacttatggctgcattatgtcagaatcctattatttgttttgctgatgcaggaggaattccttcatt

SEQ ID NO: 516 - DNA, 200 bp, Lawsonia intracellularis
tgtttcaaataactctgggattgttgttccttatggggatagtagcgccatgtcaaaggcatgtatccaattgataaaaaataaacaattatgtgaacaacttggaatacctggaagaaaaaaagtattattgcattatacaacagaagttgcagtgccacgtataattactgtgttacaacaggctataaaaatttgta

SEQ ID NO: 517 - DNA, 200 bp, Lawsonia intracellularis
gataatattgttaacttagtgtaattggttctgattaagataggatatttattttatacctatagataattgttgcaaaatcaggattaagttaattaaagtggttaaggaaagtagacgctataaaatctgttttcagatgaaaattataagctagcgttttgtttttttcagaaaattagaaatagagaaaattagat

SEQ ID NO: 518 - DNA, 200 bp, Lawsonia intracellularis
agaaatctaggtattgaacaaccaataataagggttgttttttatttggaatagaaagttatgtatgtctagtaatacatcaaaaaaatggcctaaagtaattccacctcttacacctgaacaagaagctattagccttgatttttaccattattggttagagttacttgcttcaaaatacaatatgctagaaaaattta

SEQ ID NO: 519 - DNA, 200 bp, Lawsonia intracellularis
atcatggttatgtagttaaagctgcaacccctggtttttgtcatactcttgaaattggggctggtattggggaacatttgtattatgaaaatctttctgaggaacaaacaaaaaattatgttgcagtagatgtacgtgaaagttttattgaaaagattcgtaatattcatccacagataaaagttttatgtggagactgc

SEQ ID NO: 520 - DNA, 200 bp, Lawsonia intracellularis
caagataggttgccttttgaagatggacattttgatcgaattattgctattcatgttcttgaacatttacctaatctccctgcagctatccgtgaaatacatagactttgtaataaacaatctggctctttttctatagtgataccatgtgagggaagtttagcatattcttttgcaagaatgatttccacaaagcgtat

SEQ ID NO: 521 - DNA, 200 bp, Lawsonia intracellularis
ttttaaaaaaagatataatcagtcatatgattggtttattaaacgtgaacatataaatacaccaagtgaaatttttgaagaaattgctccttattttaaaaaagagtcaacaaactatttcccattatttgtaccattagctttttgtaatcttataattggagctacgttttctccaattattcataacaattagttat

SEQ ID NO: 522 - DNA, 200 bp, Lawsonia intracellularis
tgctatttattatatagtcaccctactactatgtagttctttaggtatgctataagtataacaactttttatgaaaaaagaagtgtattgtactaatcagccataagtacatcgacatgatgtatagtaataggtacttctgtattaacactaatagacagtgtttttttatgtatccatgcataaagtgtacttattcg

SEQ ID NO: 523 - DNA, 200 bp, Lawsonia intracellularis
tacaagatattcaacaggtttattgcttacctttaggttaaacgaaaactgtcctacattatcattagtatcttttatataaagggttatagttcctcctactggagaagtaatggagaaatctaaatattgtgctatagaatcacttgtatattttggtaatgggacatcatatgtaatatttttttgtaatgtaatat

SEQ ID NO: 524 - DNA, 200 bp, Lawsonia intracellularis
ttcttgctaatgttatgagtctttgatttgttattgcatgttttttattatattgagcccacaaatagggtatttgtcttgtttcgaatatttgagaaacagtaagtggtatatttggacgatctaacatagcaattttcattgagtgaacttccatatgtgtattatcaggacaatcaagacgaagatctgttaaagtt

SEQ ID NO: 525 - DNA, 200 bp, Lawsonia intracellularis
tgtgcatcatgaggaataggtaacattgcttggaaagtcattggtttttcaaaagcaggaattcggaatgttacagaattattctcgttatatcctttgtcatcaaagttaaaaaagagttgaaacgtacccatatgagaatttgttatatcaatagagaataaacaccacttatttaaacaaacagaaataggctgtat

SEQ ID NO: 526 - DNA, 200 bp, Lawsonia intracellularis
ttttgctgctgacataagattatatacaaatggatcatatggaccaccaactatttttaatacattatctctaactgttatagatgcgttttgtgtaatatagtcatgaacattaacaataggtatatgtagataatcgactgtatcacaaacaggtaacattgttgaaaggcaactatcttttgcagcccataattcaa

SEQ ID NO: 527 - DNA, 200 bp, Lawsonia intracellularis
atccacctatatttacactaggttcatagttttggtatgtaaattctgtaacacgatacagttgtgagtttagtgggagatagtctatacgactatctgatgcaggaccttccataataactaaaggaagttctccttttttaaataattgatctaattgttttacaaggcttttttgccctttatcagagttatataag

SEQ ID NO: 528 - DNA, 200 bp, Lawsonia intracellularis
gatagaatagataagtataaaggattcctttttcctgaagcagcataaaggccatggccattcagaaaatctaagaatgtttcattcccactaagctccgaatataatatatttatcaatggtttgaatgtatcagtataagtaagtcgttcaggtacaggttttttccaattcattgtaggaaggcctaaatgatttgg

SEQ ID NO: 529 - DNA, 200 bp, Lawsonia intracellularis
tatagctgtggtacgttctccttgaaagatgttaagtataatcccaagaaaaagaatccatgcaggtagataaaagcgtattttccaaggagctaaaaaaggaacaagcccaaggataagaaaactatatagtggcatatagcctgcggctaatgtatgtcttcctaaagatcgtgtaagtaagaaaagcatagaaacag

SEQ ID NO: 530 - DNA, 200 bp, Lawsonia intracellularis
aaatgccaagaatgatccattgcttaggcttgatatgttgatgtgaaagaatcctccatgaaaagaggatacaaataccaataagaagtaaaggtcgtgcaacataataccatatagtcaatggagtaatagagtcaacaaatgctatccttccttgattcataaattcacataaagcaaatcctcgtatccattcaata

SEQ ID NO: 531 - DNA, 200 bp, Lawsonia intracellularis
ttatcaaaaacatttcctccatggaggcttactaatacagcatagataatacttaatgtaccaaagataagaagaaatgaaggtaaaacaatacgtataatgtgttgaggtctacgaagagaagctataataagtacaatccatgttccaaggattgtagctttacctattgagggcatccaaaaaaatgtgaatgcagt

SEQ ID NO: 532 - DNA, 200 bp, Lawsonia intracellularis
aatggcccataaggttacaatacgtttaaaagtgaagttttttataacccaaggtagaaagagtgcaggtaataaacccatagcatagtataatgaatcataagtggtaaataggctaaatgggtataataataagactaaaagtaatgcataccctggacggacaaatcttgtaaaaacagcatatattataaggttag

SEQ ID NO: 533 - DNA, 200 bp, Lawsonia intracellularis
caatgactttattaggcattacattccagataaagctacttgttgcctgctcttgtcctccaaaaagcataaatagtgttgggaagaagtaatcccaaagtcctcttgtaggccagatatcaataaaaggaatttgtccaaaagctataagaccatgagcaggtgtaatactattagcaggatgtagtaagtctcttgat

SEQ ID NO: 534 - DNA, 200 bp, Lawsonia intracellularis
gtccactgaaaatgccaaaagagcatggctgtcagagtagtaagacatatagggaaataccaatatttcataagagtattttgtctaatcaacttcttgtgaatagtggtatgttgataaatacaataacacagtagaagaagaggaactaaaagatagagaaatagtatttttgaacaaacctgccaatcattaaggag

SEQ ID NO: 535 - DNA, 200 bp, Lawsonia intracellularis
cattaaatattgtgcttctcctgtaataataatggctataggaagtattagtaatggcgcaccacacttaagaaaaagatgttttttgtctaagatagatataagccatcctagaataaaaaaaggtgttgtatgaagtggccagtgaatatatacaggtgtattaattttatgatgtgataataagaggaattgtatag

SEQ ID NO: 536 - DNA, 200 bp, Lawsonia intracellularis
ttagatagacacttagtgatagaaaataaaatccaaacgcagagggtttaagtgttagcaaggtagaaagttttttttgatgtgttaatacaaaaaaccatcgtatgagtaggatcccacagatagataatgtgagttctacaaatgtataaaattgtagccgataggatggatacatcaaaaaaaggatttctgtaaca

SEQ ID NO: 537 - DNA, 200 bp, Lawsonia intracellularis
cacatcattgaggctatgccaattagagcagccttttcaaaggtaatgacatcatgagtgaatcgtttagaaaaggtagagaaaatattagaaagtactgaaacaataccagaaaatgagagtgtaaagataagtaataaaataaaatatagtgattgtcttttgcaggtatctataccttcagaaatagccaagccata

SEQ ID NO: 538 - DNA, 200 bp, Lawsonia intracellularis
aatacgtcctacaaaagaactgagttcaaaagactgtactttaaatactctaaggataatatataaacttaatgtaactgcagtaaggtaaagacaaaaaagatcatttctattattaggtaatggaaagagtttcactatttttttatagtatgctgtcatggtctttatcctaaataaaacatgttttttgtgaaaga

SEQ ID NO: 539 - DNA, 200 bp, Lawsonia intracellularis
tatgtttcaagcgctgctagtccatgaggagaacctatttcataaaagcgttgtgtaacttcatatccaacaatagctcgattctttacaagaaatgtatatacatcagagagatcaaatgtagtattcttccaatcagtaaagatttttttgtggagacatgataatccatagtctatatactgcattttgtctgtttt

SEQ ID NO: 540 - DNA, 200 bp, Lawsonia intracellularis
atgtgttttattatagtctatgatacaaccattttcatattgaatattacttgtatcaaactgattgttatttttataaatggtgagtaaggctggttgagagcttttttggtatgcatcagctattactttgtagtctatatcaagataactatctccatataggaccataaactgttcactgagtaaaggtaatgcat

SEQ ID NO: 541 - DNA, 200 bp, Lawsonia intracellularis
tataaatagctccccctgtacctaataggtgaggcccatccatagaccattggatattgagtccatatttattttttttttcaacatattctataacttgttcccctaagtgtcctaggcacaagacgatatcttggatacccttctcagcaagtaaacatagttggtgttcaataaatggctgaccatgtatagataaa

SEQ ID NO: 542 - DNA, 200 bp, Lawsonia intracellularis
agtgctttgggtaatgtttttgtgtgtggatgcatacgagtagcaagtccaccagcaagaatgactacaggtaacattaggataataccacctttgttccttcataatcaaattgaaaacggactctagataatcctgcttgactcatagctttgcataatcgtactttatcctcggcaacaaatagaagaaatcctcca

SEQ ID NO: 543 - DNA, 200 bp, Lawsonia intracellularis
cctccagccccaacaagtttgccacctatagctccattattcatgcctaatagataccattcatctatttgagagtttgacataccacctgaacgttgctttttatgttgccaatgttcattcataattgttccaaaaccattgatatctcctgcttcaaggcaagctttgctacgatagccaagatctttaacatagtg

SEQ ID NO: 544 - DNA, 200 bp, Lawsonia intracellularis
aagattatctatcatttctttatcgcccttttgagagcgaacatgttgatctgctaaaatgttacttgcacttctagaaaaacctgtaaaaaagagaagtaaacgttcttcaagttcaaattgtgcttcaataggtatttgtagaggatatgcactaacagtgtcatctttatggaaagtgaaacacgttaacccaccaa

SEQ ID NO: 545 - DNA, 200 bp, Lawsonia intracellularis
aggcagcaatatattgatcttgttttccaattggttctccaagacgatcaatttctatatggcaggcaagttcagctaaatcgtgtggtaaaaggagttttcttctatgcatataaatagctttaagtaatgctgtagtaaagcttccagaagaaccaagtcctgttcctgcggggatgtcagctaatgttgtgatttct

SEQ ID NO: 546 - DNA, 200 bp, Lawsonia intracellularis
atttgtggagttttgagttcctgcataagaaggacttcgcgaataattcggtgattaatttcttctgctttagagcaatgttcaatatctgaatacttgagagagattccttctataaacggatacataatggttacataaacatatttattgatagctccagctataagaaatccttcatgttcacgatagtaagaagg

SEQ ID NO: 547 - DNA, 200 bp, Lawsonia intracellularis
aagatctgttcctcctcctccaagacttattcttaatggactacgtgcaataatcatagattatgtattctcctaaaggctggttatatctagtagatagattatattatgtcaatcattctgatgagataagaatcatttactattatggtatatactcatgagtagttaatacaaaagagatataaaaatgtaatata

SEQ ID NO: 548 - DNA, 200 bp, Lawsonia intracellularis
caatcattattactatactaatagtagtatattatatataaaaagaatgaaaatgtaataatataacaaatagttattatactatttgttatattataatagtagaaatggtaaatttttagtatgctacaatgtatatttaaattatattacaattatgtaatagttataaaaatgtatatccagattgtttatacagt

SEQ ID NO: 549 - DNA, 200 bp, Lawsonia intracellularis
ttttcaacaacttcatgtacagcaatagcttcaggtataccggctgctggcgttcgattatgttgaatatcttcataaaactcttggagttctgtagcccatgatttatctaacataggatattcccatgttgttgtttctggagggcccatttcagggagcatttggtaaagagtaactttttctactccatagctacc

SEQ ID NO: 550 - DNA, 200 bp, Lawsonia intracellularis
tcctaatccagagatatctatttttgcttgacggccatagatttcaaacgagaaaagatttttccattcagaacaactaacatgtaaaaatgctgttttttttgtatttgtttgtagtaacataaaggcattgtcatctacaggcatgtcccaatagcatgtttggacagaaccagagattgaagtaaagtctcctaaaa

SEQ ID NO: 551 - DNA, 200 bp, Lawsonia intracellularis
accaccgagcaagatcaataagatgtggaccttgatcaagaagctctcctcctccagagcgatgtggatctgctcgccattctttttcatagccaattcttccgccatgtccataccgagcacggataaacattaattctcctgtataaccagcttgaacaagttcatgtgctttaagtacagctttatgatatctatga

SEQ ID NO: 552 - DNA, 200 bp, Lawsonia intracellularis
ttaaaccctactcgtacaagctttccgctagctttggcggcttgttgaatactcaatagttcttggagattacgaccagcaggtttttctacaaggacatgtttacctgcttgtaatgcttctactgtaagatttgatagactatcatgaagtgttgatatgataatgatatctatagaagggttagcaatgacctcttg

SEQ ID NO: 553 - DNA, 200 bp, Lawsonia intracellularis
ccaagagacgtaagcatggcaatgaggatacatagatgcaagtttttcagcacgttcaaaatagagatctgaacaagcaataagttggtgagtatccccaatggattgcgctcgtttatgcccaataaggccacatccaataatacctatcttcatttgtctccccaagttatactacgttctctaccagtgattcgtcg

SEQ ID NO: 554 - DNA, 200 bp, Lawsonia intracellularis
taatgtataaagatcgctttgttgaagttcttctatatggtctggccatgcataatagttatcccatacagcacttattaaacgtcctgtaatgccattagaagctttagaagctaaaaatatacaaagttctgtagcaaaatcaaatgatgttgttttatttgtttcttttgctttgagcatttgttgataaaattgtt

SEQ ID NO: 555 - DNA, 200 bp, Lawsonia intracellularis
cgcctgcacgttcaggtccattagcaagaacttcatctaatagtcgagtatttagcaatcctggtgctacacagttaacggtgatattatcggctatacactcttgagcaattgattccattgtacgtacaacagcacttttgcttgctgcataggcttcaattcgtggcataggatttgtcgctccccctccagatatt

SEQ ID NO: 556 - DNA, 200 bp, Lawsonia intracellularis
tggataattttaccatatttgtgctgacgaaagtgaggtaacaacatacgacaaggtaatacagaaccataaagattaatttctatagtttttttccattgttcccaatcaacagtatcaattggacccataggaccataaataccagcattattcactaaaatatggacttgcttaaattttttaatagcttgttgtat

SEQ ID NO: 557 - DNA, 200 bp, Lawsonia intracellularis
aagtgattcaacttctgcaggaatagagacatctattgcaaggcttattatttgttgtttatcagagattctaagtgttttaagttcatcgacagctactacaagttgttgtttgttgcgggcacaaatacatatattggctccttcttgtacaaaagcttttgcaatagctaagcctaatccttgattaccacctgtaa

SEQ ID NO: 558 - DNA, 200 bp, Lawsonia intracellularis
taatagcagactgttctgtaagttttccttccataggggtaccttttttatatagatataataatagttcgtgttgttataaatagtcttgtatgtaaagccaattgtcgttcaattgttaccataacactatcatatgttacctggtaacccttgaacagtttacatcaagaagatagccctatggcaacatagcggat

SEQ ID NO: 559 - DNA, 200 bp, Lawsonia intracellularis
agatgtatcctttttaagaatggggtgtaaaaatcttgtaggatcaataactaacggtgtcttcatagaggaaaagaaaccaggagttacctgttctttataaaaatcccaacaagtacatacaactaaagcatctgtattctcaataacttcctgtggtgaaggtttgagagatatatggcgattatatatatatatgt

SEQ ID NO: 560 - DNA, 200 bp, Lawsonia intracellularis
ctggcaatacacttacagcaggatcatgcgcagacacttttgctcctgcttgaataaggtgtgtcgcatactcaagagctattgagcgtcggagtgtatctgtgccaggtttgtatgttaaaccccataatgcaatatgtttatctttaactctcccaagtagttcgtttagtttatgaataacccacagtttgtgatga

SEQ ID NO: 561 - DNA, 200 bp, Lawsonia intracellularis
ttattagacttttggacaccagtaagtacagaagaaacctcttcttgttttttatttttataaattgaagataaaaattgaagatctctggctaatgttccaccagagaacgccattccaggacctaaataagctttttcgccgatacgaatatctgtttttaaaccacgttcaacttcttttgcatcagcgccagtgtg

SEQ ID NO: 562 - DNA, 200 bp, Lawsonia intracellularis
ttcacataacacagcaagctcatttgcaaatgcaatggaggttgctaaaaaagtattgatagcatgttttgtcatttctgcagattctactcccatccactctattcgagatgtgatgggttcccaaagagtagaaaggattgtttgtactttaggtgagcgtacaccacatatcactcgatcaggattagcaaaaagtt

SEQ ID NO: 563 - DNA, 200 bp, Lawsonia intracellularis
ttactgcttgtcctagacggagattttcaggagaacatgcaaaatgtagatcttgtcgttgaaggtcatttgctgtttgctcaagttgtttaatgctgcctactggaagttgtgatgagattaaaacaacagcatcttgcttacaaactggcagaagtttggtgatatgtgtagtaacaaatgtacagtcagcattatca

SEQ ID NO: 564 - DNA, 200 bp, Lawsonia intracellularis
tctgcatcaacaggcgtatcaaatgttatccatacaacatcagcattttgaacagcttcttcatatgttgatttgaaacaaagttttccggtagatatcccttgcttgatctgttcttctaagccttcttctaaaataggaggaataccttgagatagttgttcaagtgttttttcatcaggatcccatgcagttactgt

SEQ ID NO: 565 - DNA, 200 bp, Lawsonia intracellularis
atgacctactgctgcacaaccagacgcataaacacatccaagatgccataagcctattattgctatattcattatgtttccctgagtttatttctggtggatactaagtgcatacttcttaagtattgaataatacatatttttattcaactattcaatatagaatagatgtttatgtttttaattcttgttctgctgta

SEQ ID NO: 566 - DNA, 200 bp, Lawsonia intracellularis
aggacaatttgtttaacttgtttgttgatactcataattataaccataccagctacagggacaaaaaacataaaaaagtgacaaacaagcccaatggctaaagcctcagaatgaggaacaccaaaaagaccaagagcaaatactgcacttgcttcaaatacgccaagagagcctggagatgaaggaataatagctccaaa

SEQ ID NO: 567 - DNA, 200 bp, Lawsonia intracellularis
gcataagataaaagaagcacacatagtattaatgatagtgagatctaactttgcaactattgtaaaagcaaagtagtaatatccaatgcttattacccatacaaggatagttgttataaataaacgtatcatccaatgaagtaagaggttactatgtaatgcactgcaaagatgattagcaatattacgaggatattccc

SEQ ID NO: 568 - DNA, 200 bp, Lawsonia intracellularis
atggaatatatctcaacataaagaaaatccatgaagatttataagataaaagtagtatgcctaaccagataaaagcaattgcactacatgtaagtaaaattgtccatttagatggttcaaagatagagagcatgaataaactgaggatggctaacagattaatatctgcaaaacgttccataaaaataacagggaaaact

SEQ ID NO: 569 - DNA, 200 bp, Lawsonia intracellularis
tctgtgcttggtttacctgttactcgtgcgatataaaaagcatggataaattcgccagctttagctggaaaaatattatttccaccaagaccaaaaaaggctgactggatagattgagaaagagagagttgtttgttaaataaaaaatatttccgaagtccattaacaatacaaataatgattgaaaaaagaaataataa

SEQ ID NO: 570 - DNA, 200 bp, Lawsonia intracellularis
aacaatagacgtcattgaatattgctttattgctgtccacatctgtccaatgtttacattataaatcgcataaataaagcaaagaatgcttataagccaaacagtaactttagctaaaaacgaatattgtctcttagatagagaaatttgctgcatgtgcgtctttataaaacatttcaacggtttcaagagaatattgt

SEQ ID NO: 571 - DNA, 200 bp, Lawsonia intracellularis
tctaagtctttatttgctaaagatagcttatcaattaactcaggagtagctgtaataatatggcaaccaatttcggcagcttgatagatatttaagacttctcgaggacttgcccataaaagctttgcttcaggaagatctttaagaatttttaaactagcctccatgtaaggaataggattacggccagtatcagcaat

SEQ ID NO: 572 - DNA, 200 bp, Lawsonia intracellularis
acgtccagcaaaaacagaaacaatagctggaacatctggtgtaaggacatctgcaactgcttgtacctgtttaaggttcattacagctgttatgtttacaatgataccttcactagataatttttgaataagaggacaacaactttccccttttgtatttgttattggaatcttaacatttgcatttttaccccatccag

SEQ ID NO: 573 - DNA, 200 bp, Lawsonia intracellularis
caataatacgtgcttcacgctccatagattcaaggtcatcagaaaaaacctcaaaggaaattggtaatccttgaacaacagtaagtgcttttttggcaaaggaaacatagtcagttacgccagctttacgcattagagttgggtttgtggtgaaacctttgataagagggttattctctaaggcatccctcattttgtct

SEQ ID NO: 574 - DNA, 200 bp, Lawsonia intracellularis
atatttgctccatccataaagagttttacttgtaaatccattgcttgaggcatgcttatatctccaacatgtgactaaataatcaataaagttaaattgttatgtaagaatttatttttgttactagtaatttttagttataatacagaaaattccatttggttgagtatatacgttacagcatctttcactacagaaac

SEQ ID NO: 575 - DNA, 200 bp, Lawsonia intracellularis
tacatggttagggttgagcgatttatcttttttgtcaagagatgaatctgctataagaattgtttttagtcctgcatgttgtccacaaaggatatctgtatctcgatcacctattatccatgattgtgataaatcaatagaatatgttgctgctgctaaatgtaaaaaatatgtaccaggttttctttctaaagacgggc

SEQ ID NO: 576 - DNA, 200 bp, Lawsonia intracellularis
ctgaaaagccaggggtaataccttttggatgggtatatgaataaaaactttccataaaggtaatcccatgttctaacagatagttattaaaggtattttttacagctagtaagttttcaagagatgtttttccttttgcatatgctccttgatttgaaataagaaaaaaaggaatatttgcttcttttaaaagggataat

SEQ ID NO: 577 - DNA, 200 bp, Lawsonia intracellularis
gcttcaatcactccaggaagaatggtaatatcttctacatgcattggtgcttcccattcatcccattgaggataatacacatttgctgtgagtaccccatcacgatcaaaaaatacagcaggttttacttgacggattcccacttcatttcctgtgctttaagtaatggatgtcctacaagtaagtgccaaacaactgct

SEQ ID NO: 578 - DNA, 200 bp, Lawsonia intracellularis
tgaaaggcttctgtatgttgagttacttcattttctcctactatgggtatgatgacgcaagcatcagcaaccatagctgtataccctccgtctctaccaactatgccaaaaatagaagctccaacttctttagcaagttctagtgcagctacgatatttgcactaatatttttttctttattcccgccaccaacagaaaa

SEQ ID NO: 579 - DNA, 200 bp, Lawsonia intracellularis
gacaaaaagagcatctccactacgtagacgtgaacctcttaaccaagatgcaaatgaagaagaccatccatcatcattgattcttgctgttaattctgaaatgttgtctgtaggagcatatgcttcaaatccacagattttacgaaagtcatttactgcgtggcttgcatggccagcgcctcctccaacacctataaaaa

SEQ ID NO: 580 - DNA, 200 bp, Lawsonia intracellularis
ataaacgtcctccaccatcacggatttggcgtaattttgttgcaatatcttcaatgtgagctggatctaattgggaggcgatatctatagtttgttgaagataagttgaactatatgttttcattatataatatcctaacagtcttaatttctcatataattataaagaagatataaacaatatttaactaaactattaa

SEQ ID NO: 581 - DNA, 200 bp, Lawsonia intracellularis
ctaatagttagttatagctagctgtagctactataaagtgtagggattgtctagaatagcttatatggtaatgcagtagcctaatcagatgatacacatatactgtattactattaatcaccttcaaggatgtttatatattctatatgaatatcttcttgagaatgtgatgtaaaagaaaagtcttttttgtttttcca

SEQ ID NO: 582 - DNA, 200 bp, Lawsonia intracellularis
tgcatattggttactaactcgtataaggtaatcttcaggttctgtattttttttaagtgtaaagaaaaatattcctgaatgattgtttttatcttttatggttccttttatctgacctccagaaggagaagtaatacggaacgatagatattctgcatgctgatcagttttatattgaggaattgaaacatagtgtgttt

SEQ ID NO: 583 - DNA, 200 bp, Lawsonia intracellularis
cgtttggtttaagtgttacattatttaataatgttactaatgatttgttataagcagcatgatagggatcataatttgcccataagtgagctccacattttacgttatgagtttggcttacacataatggttgaataagatactctttgaataattgaagcttaaaggaagaaagatttataaatgtatagtctggaaat

SEQ ID NO: 584 - DNA, 200 bp, Lawsonia intracellularis
ataagctgaatatcagttaatttttttacattattaggtagcacatgatctaatgtaactgtcgttttttcagtatatgttggtattaacatcttacaagaatatctttctgtgtatggttggttatcaaaagagaaaaagatttgcagccaccctgggacaacattagttaattctagttcaaaagtacaaactttata

SEQ ID NO: 585 - DNA, 200 bp, Lawsonia intracellularis
ggaagatatatctataggatccatatttgttgctgtcatcatatttatgacagatggactaaccattggaagatatggaccataattaatactaagaatattgtctgtaactgttatattagagtttttcccatagtatgttcctttagcattaatgggaatcattacttcagcaggtgactgtaatattgggagagcct

SEQ ID NO: 586 - DNA, 200 bp, Lawsonia intracellularis
ctttttcaaaacgacttccctttgcagcccatatttcaaatccaaggatatttctatagggaacataatgtttataaataaactctgctatacgatagtgattagctgttgaaggcatgccatctatacatcctccccaaaatggagaagcaacaatagctagtggaattttaccttcattaaattgttgttctaaattt

SEQ ID NO: 587 - DNA, 200 bp, Lawsonia intracellularis
tttacaagtactttttgtgcgttatctgtggcgtataatgagatatttggtagataaaaaggattttttttatgtgtataggtataaagtccatgaccattaagaagttctataaaagtttctttctctttaagtttttgctgtaagaattgtatcacaggtttatagttatcagtataagtaactcgttctaatgtctc

SEQ ID NO: 588 - DNA, 200 bp, Lawsonia intracellularis
tttattccatgatacaaggggaatttttaatgcttcaggagagataaatacaaaattattataagtaagtaagatgataatagcaggaataaatagccaggctggtaaatagattcgttgcttaaatggacgaataagaggaagaaggcctattaaaatgaatgtaaataccattaagtaagcattttctaataaacaat

SEQ ID NO: 589 - DNA, 200 bp, Lawsonia intracellularis
gtctaccaatggatcgtgtaaaaagaaaaagcatactggttgccattcctaaatacatccagtggattgaagaaatggattgtaatgatagactacgccatataaacaaccagcagatgctagcaaaaaataatggtgtaacaatataataccagacaacagttagtgagggttttgtaatagcctcataagcatgggct

SEQ ID NO: 590 - DNA, 200 bp, Lawsonia intracellularis
ccatattctaaacaggtaactccatgtatttctgtaattctatcaagaacgtttccgtctttaagtaaaagaaagcttatgtaaatgactcctaacattccaaaaacagtaaaaaatgctggaattactttacgaaatataacttttatgtcctgtaatcctttgatgaaaaaaacaagccataaacctaaaattgtaga

SEQ ID NO: 591 - DNA, 200 bp, Lawsonia intracellularis
tttaccagcagatggcatccatataaaaactgtagcagctaagagccaaatacaagctgatcgtataaaagttatattacgcattgcccatggtaaaaatatcaatggcaataacattaaactattataccagccagagtattcaactaatacttgagcaaaaaagaaggtaagaaaaaaagcataggcaggacgaacaa

SEQ ID NO: 592 - DNA, 200 bp, Lawsonia intracellularis
tttttgtaaatgtacaataaagaatgatgagatatgtaaggtatgagaatacctggaaccaaataaaactatctactgtatgctgttcgccagctaacagcatgaagagtgtacatggtagactatcacgaagtcctcttgtaatccatgtatctacaaatggtattttgccaaactgaataagttgttgtgctggctca

SEQ ID NO: 593 - DNA, 200 bp, Lawsonia intracellularis
aatgaattagctggatgaagcaagtcatcgtctatatttagtgatggttgccacaacataaaaactgttagcgtaataatacataaggggaaataccaatacttcatcaccttattatagctaatagatatatgtttctttgttgttaaaaaaagaaaaacagtaatagcgcataggacaattgtaaaataaaaaagaat

SEQ ID NO: 594 - DNA, 200 bp, Lawsonia intracellularis
tgattgtagtgagacttcataaccatgagtcagaagtatatattgtgtttcactagcaataataaaagttaaggggaggagaagaagtggtgtacagcttttaagaaaacgatgttttttgtccagaatagatacaatccatcctaatagaaagaaatataagatattatgaagataccccatacgtgtattaagaagtc

SEQ ID NO: 595 - DNA, 200 bp, Lawsonia intracellularis
catctagagggtaccgtaatgctttagaagaaagatatattccagaaaatagaaaaaagaatccaaatgctgctggtgttaatcgtagtttttcagaaattgtatatctttcatttatacataaaagccaacgtaatgttacaataagaaatacgccaagcgttaatgctttaaaaagatcatattgtatttcatagaga

SEQ ID NO: 596 - DNA, 200 bp, Lawsonia intracellularis
ggttcatttataagaaccattggtattgatatgattaatatggaagatacagaaataagcgtatgtttttcaaaaaggatgacatcacgtttatataagtcagtaaactgttgtattatgatagacaaaagagaaacaatacaactaaagataataaaaaaaatgcctaataaggtaaaataaagagtaggacgtttaaa

SEQ ID NO: 597 - DNA, 200 bp, Lawsonia intracellularis
tgcattatgcccattgaaaatacctcctccatgaatgcgatctggaaaggccataagctcaaaagattgtgatgtatagaataaaaaagtacttagtagagctattgcaatcgctgtgataaagacacaaaaggaatcatttcttttttcagggaaagggaaaaattttgacagtccacttaaataggatgacggcatat

SEQ ID NO: 598 - DNA, 200 bp, Lawsonia intracellularis
cttagatcccatgtttatagtagtatataaatacatatcaggagtatagtaataggatacatagatagttaatgtaaaaaaatatgctatactctctacagtattagagtaccattttaatgtacagtaaaaagtatctttttgaatagctatataatatcaaataatagtttgaagtaaatggcgtatagcaaggtgtt

SEQ ID NO: 599 - DNA, 200 bp, Lawsonia intracellularis
tattaacagaaagttacttttctgtctagcatagttatatctttcattaaacaaatgttaatccatatattgatagaagcttttatttagatagagtaaatataatgaaaaatacagctaatctccttttattgcacaaatactttctatatgtataggatatattgaatgtgatgtaagagaaaattgttgtttattct

SEQ ID NO: 600 - DNA, 200 bp, Lawsonia intracellularis
tccatgcatattgactactgatgcgtaacaaatagtcaataggttctgtactctcttttaatgcaaatctaaattctcctgaatgattgtctatatcttgaacattgcctactaaatatccaccgttaggagatagtatacgaaaatgtaaatactctgctatgtcatcttttatataagaaggtatgactatatgataa

SEQ ID NO: 601 - DNA, 200 bp, Lawsonia intracellularis
gtttctgatggatgtatttttatatctttagtaaatgttgctaatacagtattgttagataatccatgatatggatcataatttgcccataagtatggtccatagttgtgttgatctatttgtgtaactataagtagagtacatggataggtgtttaatagggtcattgaaaaagaatagatatccatataggtatggtc

SEQ ID NO: 602 - DNA, 200 bp, Lawsonia intracellularis
tggtgcagtaatacgaatatctgttattgcttttgctccttctggaagaatttttgttagctgcacttttgtcttttctttataggctggaataaaaatatagcatgaagattcactagtatatggttgatgatcaaatgaaaatgaaagttgtaacgttccttgtaatacatttgtaatctccaactcacatttacatg

SEQ ID NO: 603 - DNA, 200 bp, Lawsonia intracellularis
ttttatatggagctatttctattggagacatattggttgcagtcattaagtttataatagaaggtttgaccattggtagatatggtccataatcaatatgtatagtattattatttgttgttacattagcattatgaccaaagtattggccttgtgttacaataggaacatctactgtaacttgttcttctacttctact

SEQ ID NO: 604 - DNA, 200 bp, Lawsonia intracellularis
tgtgaagtctcttgactaaatcggctttctttagcagcccaaacttcaaatccatggatatttttataaggtacataatgttgatatataaattctgctacatggtaatacaacattgttgtattaagtccatcaatgttgcttccccaaaatggactacttacaattgctaatggaaatttacctttatcaaattgttc

SEQ ID NO: 605 - DNA, 200 bp, Lawsonia intracellularis
ctgaagttgttgtacaagtattttttgaaccttatcagtaacataaacattaactagtgacaaaaataatggattttctttgttagtgtatgcatacaacccatggccattagtaacatcaacaaacgtttcattgttttttaattgggattgtaagaattccactataggtcgatactctgctatatagtgaacccgtt

SEQ ID NO: 606 - DNA, 200 bp, Lawsonia intracellularis
gaagatttttagttttccaatttacaagtggaatttttaatgcttccggaagaagtattacaaagtcaccagagagaagtataacagtaacaataggtatagtaagccatgtagggaaaaatattttttgtttaaaaggacgaatgagtggaagaagtactagtgtaggaaaaaaaatataaaccaacgttgattattaa

SEQ ID NO: 607 - DNA, 200 bp, Lawsonia intracellularis
gtaattcgtattgtcctatacatgtattaagcatgctttgaactaaacaatgtctacccatagtacgtgtaacaagaaaaagcatacttgaagctattccaagatacatccagtgaactaaaggaatagttttaaaagagagttttcgccaagcaaaaatataacatatccctgcaaaaaaaagtggcataataacatag

SEQ ID NO: 608 - DNA, 200 bp, Lawsonia intracellularis
taagaaagcgcttctatagaaatttttggtgcaatagtactaagtgtatgtgctccaaattctaaaaaggtaaatgcttctatttcagaaattctgtcaaaaatgttccaccctcttaagaacactaaaagaaagtagcttactcctagtattccaaatacagcaatgaatgctgggattactttatacagtaaaatttt

SEQ ID NO: 609 - DNA, 200 bp, Lawsonia intracellularis
tatattctgtagtcctctaatacaaaagacaagccataatcccaaaatagatgctttcccagcagatggcatccataaaaatacactagcacttaaaaaccatatccatgcaatacgataaaaggttagttgttgcattgcccatggtaaaaaaagaggaggtagtaaaataagagaattataacaagccatattattaa

SEQ ID NO: 610 - DNA, 200 bp, Lawsonia intracellularis
aagtcagttgcgagaaaagtaaagtaagtaaacatgcataaataggacgcacaacttttgtaaatatagcatatagtaagatgatataagttatggaccaaagtatatcaaaccatataagactggatacagcataattttctcctgcaaaaatcataaagcataaagaaggaaaaatatcctttaaacctctatgactc

SEQ ID NO: 611 - DNA, 200 bp, Lawsonia intracellularis
caaacatcaacaaaaggaattttatcaaatttgattacttgttgtgcaatagtgatactatttccaggatgttgtaagtctgaaccaatatcaagagttagtttccatgaaacaaaggtagttaaagtaataaggcagataggaatgtaccaatactttagaagattgttgtaatgtattgagtattgtttataagttaa

SEQ ID NO: 612 - DNA, 200 bp, Lawsonia intracellularis
ttttcttttcctctgtaagagctgtagtatatatatatattacaaatcctaacaaactacctgtaaacaaaaataataatgtttttagagaccattggtatcctcttagcagacctatatactgagtctcgctggcaataaggatagttaaaggtaaaagaagaagaggtgcaccaatcttaactaattgatgtctttta

SEQ ID NO: 613 - DNA, 200 bp, Lawsonia intracellularis
tcaaaaagagaaatgatccatcctagaataaaggtaatcattatcccatgaggataacctatacgtatatcaataggtgtatctagtggatatttatatacctttaggaaaaggtgtattgctgttaatagaaagaaaaaaccaaatgtaactggtgttagtttacatctaatgacaaaagaagaataacctattgtaga

SEQ ID NO: 614 - DNA, 200 bp, Lawsonia intracellularis
taataaccaacgaaacattaaaataaaaagtataccaaagaataatccattaaaaacatgatattgtacttcatagcatggtttatttattaatataaaaaagatagaaaggatctctattaatgataaagcagtgagagcatgtttttcaaaaaggattgtatcactttgatagttctctaaaaaatgttttaccatta

SEQ ID NO: 615 - DNA, 200 bp, Lawsonia intracellularis
ttgaaagaagtgaaacaacagtagtaaaaatagaaaaaaatattataaggaaagtaaaataaaggaattgacgtataaatacattatgaagttcaaggatagcaatgccttgtacacgatgtgggaagctagttaattcaaaagagagcgataaatagagataaaaaatacttaatgatgctaaagcaatagctgtaata

SEQ ID NO: 616 - DNA, 200 bp, Lawsonia intracellularis
aatacaaaaaaaagatcatttttttatgaggaagaggaaaaatttttaaaaaattacatgtagtagtatttgacatattaaacccattactaattattttttctctactgagtaaactagtattgttccaacacgtatcagaggcataaaaaacaattatttttctttattatcaaaaacccatgtgttttccataagcc

SEQ ID NO: 617 - DNA, 200 bp, Lawsonia intracellularis
aactgacagttgtttttacactttcttctatggtatacttaggcgtccaacctagagaacgaattttttctgttgcaagataaataaaaggattatctcctatccaaccacgatcaccctcgccaaattgaacagttggtgttactcctaatgaagagcaaatccatccaatagaatcctttactgtacaataactatca

SEQ ID NO: 618 - DNA, 200 bp, Lawsonia intracellularis
acacctaggttatagatatgaacctttgtatctgtaggtgctttttctattgctagcaacattgcatcaatacaatcatctacatgaagataggattttcgttgtgtaccatttccaagaacagtaagttttgaaggatcttttcttaattgattacaaaaatcaaaaacatgtccgtgtgtgtagcgaggtccaagaat

SEQ ID NO: 619 - DNA, 200 bp, Lawsonia intracellularis
agaaacaaaacgaaagatatgtccaataaagtcgaaagattcacaataggcctcaatgaatccctctcctgacaacttcgatgctgcatataaagatgtttgtataggaaatggagcatcttctggggtaggtataatagaagcttcaccatatacagaccctgtagaagcaaaggctatccgtttaatattatgtaaac

SEQ ID NO: 620 - DNA, 200 bp, Lawsonia intracellularis
gcatggcttcaagcacattgtgtgtggcaatagcattttgttcaagatctttcgatggatgttctactccaaatcgaacatctgcatttgctgaaagatgtatcacttgctcgcctgttgcaaaagcttttgacaatgctttagtatcaagaagatctccttctattagtgtaaagcgttcatgttgttttgccttatta

SEQ ID NO: 621 - DNA, 200 bp, Lawsonia intracellularis
agaaatgtatgttttcctgtagagaaattatcaattcctgttacctgatgacctatagataaaagtttctctgctagagtactaccaataaatccggctacacctgtaataatgtagtgcattttctctccataaaccaagataatatgagttattcacaataaatatcataacttacaaaaacgatatttaaaacaagc

SEQ ID NO: 622 - DNA, 200 bp, Lawsonia intracellularis
aataatccataacaagggatctttaaaaatatgaacttttttcccttcattgagagatcttgaatgataatgaacaggaatctctaatggcctataacccttacggcataatttacctacaatttcccaatcaaaatcaaacctatttgctgtaaaagtcaaaccttgaatgcaagagcgtcgaaacactttatacattg

SEQ ID NO: 623 - DNA, 200 bp, Lawsonia intracellularis
taaaaggatcttttaatttctgttggtaagtaatgttaaaaagaaatgtaaataatagatgtccaaagttaaaataatattgggaaaatcgttctcttttggcaaatcgacgtattttccaactgcggcgttcttggctgtgtcttgaacccaacacaaaatctgcttttttgtctatcagtagctgtaagagttttgga

SEQ ID NO: 624 - DNA, 200 bp, Lawsonia intracellularis
tagtcatcaagatcatactctgtatctgcatcttgaataagaatatagtctcctgttgcaacttgtagtccttttcttacagcatgtcctttgccttttgcttgttcttctaggataacttttacttgaggatgttccttatactgtaggacaacttctcttgttccatctgttgaattgctctcaacaataataagttc

SEQ ID NO: 625 - DNA, 200 bp, Lawsonia intracellularis
tttttttaaattaactaaaggaagcttaaggacaccatcaatgacttcttgaatagttgctgcttcttcatacgcaggcataatgatacttagtttttccatggtgttacctattataaaaagaaagatagaatttgtttttatctatatgagttgtttaataacgatactaaaaagataaagcattactatcagaacct

SEQ ID NO: 626 - DNA, 200 bp, Lawsonia intracellularis
atgcttcttatgagagaagttataaagattttctatatagtatattacaaatatgtttgtctataaaaaatatactcctatgctatataatatactttgactagaagtatacttctaattatttctgtgtataaaaagtattgatgtagtatatagaaagtatatatcttttggaaatcatactatatagattcttgtta

SEQ ID NO: 627 - DNA, 200 bp, Lawsonia intracellularis
tacctatatagtataacagatatacttttaataatatgtataaattttaaagaataaaatagattaatagataattttaaggtaaaaattatagagtagaatgagtacattcatgtgtatttggtaatagatgattattaccaaaatacactatgaattccccagatgaaatatactatttataaagaatatactatatg

SEQ ID NO: 628 - DNA, 200 bp, Lawsonia intracellularis
aatagattttacttcttcaactgttgttgcttgttgaagctgaagttcaaactcagctctttgagtagaaagaatagttcgtatttcttctattgatttaccactagattctggtgtaggagcaagaataacattcatcaatgtttcattataggctgtatctatatcaagaaatacttgttcttttgcttcctttaata

SEQ ID NO: 629 - DNA, 200 bp, Lawsonia intracellularis
gtatagcaggatctggctcaggacgtgtaagtattgcatttttaggaagaggtcctggctcagtcatataacatggttcaggtttccatgtatcaccaggcaaccagtatggtgtccctgttccttcaataatacgatcacgcccatcctttttctgtctatgatcttctacttgtttccatgtactaccattccattga

SEQ ID NO: 630 - DNA, 200 bp, Lawsonia intracellularis
ggaataaagttagactgtattttaggtttcactttggtacaattatgaggtaatccttgataggcatatgtttcactaacaaaaaagccttgataatcatattgatatacggtttccattagtgtattcctcctacatagacacaaggaagtaaaccaattcgacgtggacgaaattgtgcagcagtaggaactgcgcgt

SEQ ID NO: 631 - DNA, 200 bp, Lawsonia intracellularis
gaagcatctaagttaatttggtgatttgcatagccactaggattaaaagtttgtatgacggtaccatgtccactggcataaaatatcccgccacaatttgaaaaatcgataatattattataaaaccaagctgtaatatttcgcatagcatcattttcccatttcccaatagagtcacctacatttccataaatatgatc

SEQ ID NO: 632 - DNA, 200 bp, Lawsonia intracellularis
tgttcttgtatctgggagttttatagtctttgctgcttcgtctaatacaaaaaaaggaacaccaccaataccaccagcagctgttgatagtgctgtccaatctgcttgagatttacatttccaagtatttttttcttttcttaaataattccatagatcaggataagcagtgtcggcatctggaagtatggacccatctc

SEQ ID NO: 633 - DNA, 200 bp, Lawsonia intracellularis
ggacagcccaacccttaggtggtgttttttcaaaaaaatctttaaattcgcttaatgttggtatgatagatatcacaccttcatctgttatttgaacaggttcgccgtctggttgaactaaccctggtttcattgatgttgcaatggatagacgctgttcaataagtttatctatggcatcacgtagttgaattgtagat

SEQ ID NO: 634 - DNA, 200 bp, Lawsonia intracellularis
tgtttattaggttcaatttcagcatgctcaagaacagcaataagttcttcttgtacgctattgagccaatcagcagaaacagttgttgcttctataggtatagtaggatcgccttctgtgaatcgattatttggtgtagcatctggggtatcaatacgaaacatgtaacctccttatagtgtatgaataagtgatagtga

SEQ ID NO: 635 - DNA, 200 bp, Lawsonia intracellularis
ggggagaattacactcccctctatgattatcctgtcaacgctgttgacaaaggatacacgtatagcaaaggataccggggtcttctgaataaccataacagacaaatcctcagtcgtatgccatttttgtatacgtgttgtaagtatccatgagccatgtatagcaagttagaaggggaatgaaagattgactggggtca

SEQ ID NO: 636 - DNA, 200 bp, Lawsonia intracellularis
gtataaaaaggtaggtacattcacactgtaagaagatagattacatcattaaatagtaattagttaaatagtatttggataaatccatctacctatattgactaacgattagacatagttttgttattcttaacatcagaacaattattgtatacaatagtacaagtataattaagtgtgttaataggtagttaacgtat

SEQ ID NO: 637 - DNA, 200 bp, Lawsonia intracellularis
cattatgaatatactatatggttgtgttagttttctttttattacgtttttatctttaccgtttttgctaacagtttgtggtattcagataagaggaatggataatagagaaaatagagtattagtagaaaaaccagcacttaataaaacgtctttacaaaaatggccatcagtacttgatccttggtttcaagatggtc

SEQ ID NO: 638 - DNA, 200 bp, Lawsonia intracellularis
ttgcttttcgtagtcattgtgttggactttatttaacaatatgggaagaatggctttcagctcctgttaaatctgctgccacaggtaagaatggagaattattccctatcctttctacagcacctgtccttcaatactatcttggtctaaagccaattgatcctcatgaatatatacattttcaacttgcccatgcaggt

SEQ ID NO: 639 - DNA, 200 bp, Lawsonia intracellularis
atgtatattttcttaaagtctaaggggataccctatttccttgtaactattccggataaaccaacattatatccagaataccttccattttggacacgttggtgtaaaggagaaagtgtacacaaacaaaaagtaaaagctattcaagaaataggtatcccttggatagatttacttcctattcttcatgaaaaaaaata

SEQ ID NO: 640 - DNA, 200 bp, Lawsonia intracellularis
cgaacatgctctttataataaaaagtttgatcctggccacatgaatggttatggaatggaaatatgccatcagtatcttatagaagcactgggcaaatattttcctgctcttctatcaacggctagtaaaccagcctatagagtatatgaaacgaaaaggtataatacagctttttctagtgaatggctttcaagtatag

SEQ ID NO: 641 - DNA, 200 bp, Lawsonia intracellularis
agttattacaaatagaacgatttcaatcaaaagagatacctaatcttattaaaaaagaacctcaaacctggtttgaacctcagcttattattaataatcgtcctctatcaccattggatatagtattctctggtgattcttattttttatgttcatgtcaatatgctccatctcaccgtatatggccaggagatctccct

SEQ ID NO: 642 - DNA, 200 bp, Lawsonia intracellularis
cttttagcatattattcaaaacaatttttaaagatgaatatccaatatcttacaattccctttctcaaacaactttttgatactgggtataaaccagatgttgttatagaagcccttgcagaaagaaatattggtactccatctcgagcaaggaaagattctctactccgtacctttggagatatttatttaaaaacacc

SEQ ID NO: 643 - DNA, 200 bp, Lawsonia intracellularis
catctattttctaactccagaatatattaagaatataacaaataaagaagattctaatgatattactatatatatatataacaatactatttttcttaaggcatcagcgaatccatacatagagttaccttctttagttacagatgctaatggacgtgctgcagttgttgctaatatattttctcctatccaaacatact

SEQ ID NO: 644 - DNA, 200 bp, Lawsonia intracellularis
ttggtgtgtattatacaccaaaagatataggatttgttcaagaatcatctattaactgggtaaaagtagaaccaggagaaaatttagtacatctatatattagtactcatccgtatcaagaaatatctatccgttttcatttaggctttgatcataatgagtatcgtattcttcctataccagatgaaataaaacagatg

SEQ ID NO: 645 - DNA, 200 bp, Lawsonia intracellularis
caaaaatttgtatctgatagcatttaatttacatctcactgaatatagatacataactaggtctagtatatacttcttcaattatgtagttagttattagtaatattgttatcatagtgttccatcataataacatttatgtaataggaacgtgtctgtattctttaataacaacatattgtgatgaaaacatgctatct

SEQ ID NO: 646 - DNA, 200 bp, Lawsonia intracellularis
ttaaaaagtattcatcaataatattaaatggatatacttgacaatgtcttacttttattttctatatatctccttgcataaaattatattattcactgtagttacatgtataaacagcacaatcctcaatataacaacataataagctagttgagctatatataaaatagatgcaagttattcaatcaatctttattttt

SEQ ID NO: 647 - DNA, 200 bp, Lawsonia intracellularis
attttccttcttttttcaacaatgcccttttgcttatctcttcttgatctttctccaaaaactgtaactctcagagaaaatagagtattaacagaaaacccttcacttaaggacacaccctttcaaaaatggccaaaggttcttgatccaaggtttcaagactgtcttgcttttcgaagtcattatgttgctctctatct

SEQ ID NO: 648 - DNA, 200 bp, Lawsonia intracellularis
taaaatctgggaagaatggctttcagcccctgtgggagaatatgctacaggctatgagaatgatgtattctatgttacttctcttaaaaactatctaggtgtaactccaattactccagagaaatatgcatattttaaacttgctcatgcagggctttatgcttttttcaaaacaaaaaacattccttatgtttttataa

SEQ ID NO: 649 - DNA, 200 bp, Lawsonia intracellularis
ccattccagataaaacatcattatatccagaacttctgcctttttgggcacattggtgtaaaggagaaagttggtacgatcagttcacaaaagctattaaggaaattggtattccatggatagacttatttcctatttttaaagaaaagaaagctacatataaagtatacaataaaaattatgatactatgcatatgaat

SEQ ID NO: 650 - DNA, 200 bp, Lawsonia intracellularis
gcatatggcgttgaaacatgttatcaggaaataggaaaaagactacaattccctgagctcatgccaacatcaagaaatgaattttatacagtttcttgggataaaattgttatttctaaatttataaaagaaaatgtaccagtctttcaattattacatacagatcgctttcaacctatagaaattcctggattagtaaa

SEQ ID NO: 651 - DNA, 200 bp, Lawsonia intracellularis
ttttgaagcaaactattggcacaaaccaagacttaataataataagcccctttcacctcttactgtatggcttgttacagattcttattttttgctatcaggtcatcaagaaagagaatatcctgtatttaggggagatatacctttattagcctatcatacaaaaaatctttttactacacatgttcaatattttcttt

SEQ ID NO: 652 - DNA, 200 bp, Lawsonia intracellularis
cacctttctttcaagaactcttaaaaaaaggtccctatcctgatattctgatagaaactcttgttgaaaggaattggactaccatggatagggcaaaggaagatccatttatacgaatagctggagacatttacttacacacaccaggctatttacttaccccaccccttatagacaattatatatatatataacgatat

SEQ ID NO: 653 - DNA, 200 bp, Lawsonia intracellularis
aagcatagataagaaaaacaaaaataaaataacattcactacattaagagatccatacatagagttgccatctatcataacagatgctgatggtcgtgctatgattgcagcacatgtgcattcttcaaaaaagacatatataggtcttttttataaacccaaagaatctaatacatttaatcttaaagatgttgtttggg

SEQ ID NO: 654 - DNA, 200 bp, Lawsonia intracellularis
cagaagttcaaccaggggagaatactgtccatcttttttttattacagagccccataaggcaatggatataagagtccactttggatatgctcaaagtgaatatacaattcttcctatgcctgaagacatacaaaggatcaaaaaaatgtcagatgcaaatagataaatagactttttatgaaaaataaaaaaacaatac

SEQ ID NO: 655 - DNA, 200 bp, Lawsonia intracellularis
ttttgataacaaaatgttatgtaacattgtattgcttaagctataaaaagaattgtatagggtttcctgttgacaatatctaatgttaaactataaaatcctgttgctatattatacacctataactaaaatttagcctatcctttttcatgaaaattctccaatcgtgtttcactcttttattcctactttttttatct

SEQ ID NO: 656 - DNA, 200 bp, Lawsonia intracellularis
attccatttacactaacaatttgtgattgtgctccagaacctattgataatcaagaaaatcgagtattagcttggcctcctaagttgaaacaaaattcacttcgaaattggcctaaaagacttgacccttggtttaaagattatttagcctttcgaacacactttctttgtctttatcattggatatggggaagattctt

SEQ ID NO: 657 - DNA, 200 bp, Lawsonia intracellularis
aggctctaatctacaagactatgctataacctttaatggtgaattatttcctactttaaatggtgcaacagttttacaaaattatttgggtttatatccatatacaaaagaacaaattacaaattttaagttgttacatgcaggaatatatgctcgttttaagtcagaaggtattccctatattgttgtccctgttcctg

SEQ ID NO: 658 - DNA, 200 bp, Lawsonia intracellularis
acaaaactaatgtatatccagaatatttacccttttgggcttcttgggctaaagggttaagttattatgatgaacttatacaggctattcaagaaatacgtataccatatatagatatgctatctattcttgaatcaagaaagtctgaacatcaactctacaataaaagatttgatactgctcactggaatggctgggca

SEQ ID NO: 659 - DNA, 200 bp, Lawsonia intracellularis
cttgaaattgcatatcaagccatggggaatttccttacaaatattgacacagggtttgagccaaggccatcaggtgaaatttatgaaatttattttggtagaccatatcctcgtctatacactcgagaacgtgtaccattaatgaacgtatactctcataatctccatgtagaacatttacctgaactatctaaagaaaa

SEQ ID NO: 660 - DNA, 200 bp, Lawsonia intracellularis
tccttgctgggcagatcctcaacttattgtaaatgacaaagcaaagttaccttataccttatggtttgtttcagattcatactttctatttgcatttgataactaccaaccttggataggtggtatttctccattagcacaccatacaaaaaaattcttaagaatgcatttcaatacatttacccaaccatttattgaaa

SEQ ID NO: 661 - DNA, 200 bp, Lawsonia intracellularis
aatcatttggaacatcatactctccagatattgttattagaacatttgtagaaagacttcctagagatttaatgcaagatattgatccagtattaaaaatttatggagatattcatttaggaacctctggatatattttaacaccaaataatcttcataaggtagtagctgaatcaaattgttgtataactaaagaaata

SEQ ID NO: 662 - DNA, 200 bp, Lawsonia intracellularis
gatcaagaagaacaaggaataatcattattgattcttcttcagacatacctctttttaccttagccccagttatagcaggtaaagatggacgtgttatgtttgcaacatatttgaaatctcctattaaaactacagcacgactatattatacaccaaaaagtataggtaccttaaataaagaggactttgtatctataga

SEQ ID NO: 663 - DNA, 200 bp, Lawsonia intracellularis
gctcgaggaaggggaaaatattatctatatgtcatttgatacagagcctggacaagaaatggttctttattttgaacctggatgtcatccaggagcgtataaagttctccctatgccaaaaggaatccaacatgttcaacatacatattctagagagtcataatggtttttagttctgttacgtttgttttagttttttt

SEQ ID NO: 664 - DNA, 200 bp, Lawsonia intracellularis
accccttgttcttattagttacttattattatatcttcatctgcatacaccaaaacataccatgctttggtgtaatacgtttttattaatagcaagtattatcttttatgcttggggcgagccaaaatttgtcatctggcttattgtatcaatgatatttaacttccatatggcacttctcattgcacctacaaatagta

SEQ ID NO: 665 - DNA, 200 bp, Lawsonia intracellularis
gatccatgagaatttttggactatctaccgggttaattcttaaccttttgttacttggttactttaaatatttaaccttttttatggaaagtggttttgctctactagaaattttctttgaaccatcaattaattcatcacaactaaaaactattgcacttcctttaggaatcagtttttatacattccaagcaatgagc

SEQ ID NO: 666 - DNA, 200 bp, Lawsonia intracellularis
tatcttattgatgtatatagaaatgaagtccctgtatctcgcaatatcattaattttggatgttacctcacaatgtttccacaacttgtagcaggacctattgtacgatacatttctatacaaaaagaacttgaacatagagaactttctccacaacgcatatcaagtggtattggtcgatttattataggtctttctaa

SEQ ID NO: 667 - DNA, 200 bp, Lawsonia intracellularis
aaaacttcttattgcagatactcttggaagagtatcagaacaagcttttgcaattcctacagatcatttatctccacttgctgcatgggctggaattatttgttatactctacagatttattatgattttagcggatactccgatatggctataggattaggacatatttttggttttacttttcctgaaaactttaatt

SEQ ID NO: 668 - DNA, 200 bp, Lawsonia intracellularis
atccatacatttcaaaaagtattaaagaattctggcgtcgttggcatataactctttctacatggtttagagattatctttatattcctctaggaggcaatagacatggattaggtcgaactgtcattaatcttcttattgtcttcacattatgtggattatggcatggatctaattgggtctttattgtttgggggtta

SEQ ID NO: 669 - DNA, 200 bp, Lawsonia intracellularis
tatcatggttgtttccttgtttttgaacgttttttccctaaattccctagtatattcccaacattcttacaacatgtatatgcagttcttgttgttacattaggatggatttttttcaaagcaacttcacttacacatgctaaagaatatttttatgctctcatttcaggaaatcctccaggaattcaagcaaaccatgt

SEQ ID NO: 670 - DNA, 200 bp, Lawsonia intracellularis
atggttacaactctttagtacagacgtataccttgcacttatcattggtatattaggctctatacccatctttccatttttaaaaaataaatgggaacacttgcttataaaacaaaaaacgtctattgctatttcattagaagggttacgtttttttatgctatttctattattttttctatgtatcatgcctctttttg

SEQ ID NO: 671 - DNA, 200 bp, Lawsonia intracellularis
gctctacctataatccatttatttacttcagattttaatataggttgaaacctctgattgttaatgactgtcattggaaggaggactacattaacaatcagaggcacatccttatttatctttattattgaataactcttattcataaaaaaaataaatatgttatgttaatgattaagggatacattaagataacaaat

SEQ ID NO: 672 - DNA, 200 bp, Lawsonia intracellularis
aagataaccatactggtaagtttaaacttctcagttaatcacataattactatatgttctatatagcaagctatggtagtcttattaatcaacacattatttttatttataaatgtgattacacaccagttactatttataaacactatttactttttattaggttaatatgtgcaacaatggatagagaattaataaaa

SEQ ID NO: 673 - DNA, 200 bp, Lawsonia intracellularis
aaagtactagggcttattataaagaacttcagagaagaacaagggctaagtcggtatatagtagcaaaagaaagtggtttggattcttcttggttacgaagattagaagatggaaaatctggaattcgaactgaaacactcattttaattgcacgtggattaaaacttcctgcagcaactattattacaaaaatcgaaca

SEQ ID NO: 674 - DNA, 200 bp, Lawsonia intracellularis
agcacttgaaaatccagatgcatggctagctaactatagaacaactagtgacagtatatagctcttctttttcatgttatcgttaccttaaccatgtaactaatcatacataccatttttgtatgatttactattcagcactatatagagaaatgttctccattatcagtttataataaaaaactatcaccacattttat

SEQ ID NO: 675 - DNA, 200 bp, Lawsonia intracellularis
atagtacttttcttataaagacaggataaacagtattctattttactattctgttacctccaggagtcatacatagtttgttcagagtaacttgatgaagaaacaggtataaatccatctttgatagatacagaagaacaagcaatttcccataacatttctaatgcatcaggaccatcatcatgatcagcttttgggaa

SEQ ID NO: 676 - DNA, 200 bp, Lawsonia intracellularis
atggcgaagttgatggataagttcttgttgtgatgggtgcaaaagaatatgtttttgaaccatatgaggttgtaatgattcaatacgtaacaatttatctgaattatgtgtaattgctttaactggtaaagctaatccgcttttctctgcccgttgaacaagaacatgtgcaaaaaactcttgaaactgcacggcttcta

SEQ ID NO: 677 - DNA, 200 bp, Lawsonia intracellularis
ctccccataaaacaggtttgtattgtctatgtaaagcaataatatcttcaataatcctatctggatgacgtttcctaatagatgcttctatcacatgaagtgtcatagatttttgacaaaatcctccaacaagtaaagcagatggatcccttccagcaccatgtttacctaatgaaggatcacaaactccaaaaaaagtc

SEQ ID NO: 678 - DNA, 200 bp, Lawsonia intracellularis
caactatccgaaggggtcgaccaatagtaaatacactgtgcaaatggtgcatcatcaccacataaaggatcattttggtattcagaatcaaatgcagcatgatcttctgctctacgcttcatgagtaaatacaatggacgcatacttggccaacttactttggaaccctgaagcatttcttcttgatgtacctcccaaaa

SEQ ID NO: 679 - DNA, 200 bp, Lawsonia intracellularis
acgccaggcttctttttctccttgttcagaaagaataacttcccactgatcccataaatccatacggtcaggccattgaagaatggctttaaatacttttttttgccataaagatttcgtcaatgtgcgtgcaaggactgaatcataatgaaggatggtacctatataaaggacatccatagaatcatctgctgagccaa

SEQ ID NO: 680 - DNA, 200 bp, Lawsonia intracellularis
gatttaaaactgttttttgaagccaagcttgcaatttatctctctgctcaggctttcttacttgctcatcattctcaagatcatcaagaataaaaatcaggtcgatgtgctccatgcctaagtcctctcatacgctttcctgcacttagggcctgaactttgacattagaacatgtaataattgttccttcattccaaac

SEQ ID NO: 681 - DNA, 200 bp, Lawsonia intracellularis
actgccctctcctgtactttcaggaaaatcttgttgtaatcgaggattagaagtaagttcaacttttatagcttctagtaaagaaacactttgttcaatagtatctgctataagtaagatatagtgttttttataggttattatagcccatataacaaaaaataaagataccattgtagactttgcctcaccacgaggtg

SEQ ID NO: 682 - DNA, 200 bp, Lawsonia intracellularis
ctgcaatagctaaccattgtcctttagggttattaagaatacctggtaaggtctcatcaagccaacgatgaaggactgaatcatgatccatgaatagttgtctatgatgatttgtagtagaaccactattaattgaaatagggcatatattatccaatctatgtggaatattatctactgaaacaacagataattgttta

SEQ ID NO: 683 - DNA, 200 bp, Lawsonia intracellularis
tctattacctgtacattctgtttaataatacctaatgactctaagctactatctgaagaaatggtattttggaatatcttgttttgctctactgatgatatgggttgtctattttgagtaggttgtattctgtgtacataatgaggaaagtaggtttttctaaaaaaagaaaaatcatactgaacacgttctatcctttt

SEQ ID NO: 684 - DNA, 200 bp, Lawsonia intracellularis
ttttgtggcattagtcgttatttcaaactcatgacaggttgtttcaatctgtcgtgcaagggtatttgcaagtgagcctatagcattagaaaatgctttttctgaaagtttcactgaccatactctgtaataagaatattcccaaatggttctaagatttctaaaagatataaagcatgttgaggataacgatgctgtgt

SEQ ID NO: 685 - DNA, 200 bp, Lawsonia intracellularis
gaattgtacaagttttctcatgacatcaagggcagtagcaagtctatctgtttttggtaatgcatgacggcttgcttcaacagtttttgataaactagagctcaattttgctaacatgtgtactttagtagatgtagaaatatccatatcttcttggatctcttccaagatttttttatgctgtaaaacatactcaataa

SEQ ID NO: 686 - DNA, 200 bp, Lawsonia intracellularis
acatttgacgtgtaatattttccataccgcttcctacaagaaaaaaatgttctcgtaggatatcccaatcatcagaaagtttttttgcctctcccttccaacgtgctgctgtggacagagctacattaaatgaagacgcaacttctgcaagagtttttcgggatgtaatatactcattgcgtatggcttcctttgtttca

SEQ ID NO: 687 - DNA, 200 bp, Lawsonia intracellularis
ggagcatatgcagacatatatatccttttccttcttaagattgattattattaagtgatgctttttcaagaattttatataaaagaggtggtacaggagcatgagatacctgtccccattttttatgtattatggattcacaaatttcttctattcgttctttaaattcttccttaggaatatactccttaggaagacgt

SEQ ID NO: 688 - DNA, 200 bp, Lawsonia intracellularis
tctcgtatatcaataagacctgtaagaattaaagtaatacggttttcaagtcgtatagcccagtaggataataaagcacagataactccaagcagtccaataatattattatcaatagtaaaaagtgtcactgttgtgcctccagaagttctccaatagcatgtagttgtgtttcaattctacgacaatatagtccataa

SEQ ID NO: 689 - DNA, 200 bp, Lawsonia intracellularis
tcctgtatgtgtgataataaatcttttggtgtgactatagactcattagtttgtgaagaagatgctggtaaagtattattagacgattgttttataaacgactctttttctaatacattggactggttattctgcttgctagtatgttgttgtataagtgaagacgaatatgctaattggttttgctgtatcctggcatt

SEQ ID NO: 690 - DNA, 200 bp, Lawsonia intracellularis
agtggttccggcggttccggtatctgaagcagaacccctggtatgagcgtttttacctctggtgttattactggaactggtgagcccaaggacctggttgtaggtagacacccactcagaaggtaaaccaagacagtaagaatcagcccttttagatacctcattaatctttcctttaaactcattacgttctttggtga

SEQ ID NO: 691 - DNA, 200 bp, Lawsonia intracellularis
gagttttacgtacttctcctaattctttcataagagaacgtatatgttctgtttgctgttgaagacgtatacgtgcttgttgttctgcttctgcaatagcttgataacgagcttgatcatttttagcatattcagattccaacttagcaacaattgctttatatttattagttgttattgactttccccgttcgtatcca

SEQ ID NO: 692 - DNA, 200 bp, Lawsonia intracellularis
gaaatgaatagacctattaggccaataatcacaaaaagatatttaccgataatcacactcaacccctctaccccatcctgcatcttcatactttttttgataggtatgcagaataacttttggatacttcctattttcttgaaaggctgattttctacgacctgcatttatgcgttcaacacaatcccaataacgatttg

SEQ ID NO: 693 - DNA, 200 bp, Lawsonia intracellularis
gatcaagtccattatcttttgccatacgtttatctttttgaacccatccaagtccgccattgtatgctgagagcataaacgccatttggtcacattgataaatggcatctactcgctcccaaagccatagatcatatgtaaccaatgcacgtaaactccatgcaggattaaaaggtagaggctcacctgtttctggagca

SEQ ID NO: 694 - DNA, 200 bp, Lawsonia intracellularis
acagttggcaaccaagcagctgtttctggcataaactgagctaatccctgtgcaccaacaggacttactgcattttcatgccataaggattcagtgtgaatctgagctgcaaagagcgcaacaggtgcatccattccccaaacttcacgagctaccctaataagcacatttcgatgacgctgtgctgcataaggaatttc

SEQ ID NO: 695 - DNA, 200 bp, Lawsonia intracellularis
tccaagacactctttggagccacataacaataatagaataatacaacatacttttaacattgttataacctacttatagcttgatactataccaaatataacaaataaaaagattgaagactgtcagccaaataaagtgttggtactaacaatggttacaacaatcactttttataatcagacaatatacagtttcatta

SEQ ID NO: 696 - DNA, 200 bp, Lawsonia intracellularis
gattgacatcttcttaaacatctaattcttaattatctatatttaaaggcaaattatccttttatgaccttctaatgccttatgaggggatgtcatctaatatagataatatagatcttaattataatatgcagaaagtataaagtcctaatatgtaggagttacaaagagctatcctaatatatcaataattatgatag

SEQ ID NO: 697 - DNA, 200 bp, Lawsonia intracellularis
gttgtcggtttattgacgattttgggacacaaaatatttttcaataatctagataaattttttaatatagtagtcttaatataacacctgattattttatgatctttcacatatggaacaccccttgcacatcaattattatatgtgaaaagaggagtgtctagttgcaatgatctcaataaattatgcatcccttttgt

SEQ ID NO: 698 - DNA, 200 bp, Lawsonia intracellularis
gctaattaatagttagccatacattgagctatttatgtttttataaatatgtaaagatagttacgaaaagtactttcatttccccttatatggtggagtacttttttcgtgcttattctggcataggagaaggtatgacagactgtacatacattataaatgaattatatctaaatgtaacttttaaatttttaataaaa

SEQ ID NO: 699 - DNA, 200 bp, Lawsonia intracellularis
aaaacaatatggagtgtgaaatgtagataatataattactaatttagtatataactatgtagattaaaaaaattttattaatttataaaattaaaaatagatattttgttaaaattaaaaagaatattttttatttttaacaatattttttaattagttaaaaattattttttataaaaaaggtaatttttatgaaaata

SEQ ID NO: 700 - DNA, 200 bp, Lawsonia intracellularis
aaaaataaaattatttttatttctatagttattattagtatgtcaattatgttacttatattgagtaaatacagcattactaaattatatagtatagatagctatataacaaaaaatgaatatactaagttatattattttttagataaaaaatttttttatgatgcagaatatgtaaaaaaacaggctaacgataataa

SEQ ID NO: 701 - DNA, 200 bp, Lawsonia intracellularis
gctattaaaaaaaatgtataaaggtggagatgataggtctatactctctaaaaaatatattgcattacttgagacacatgaatcaaccttcgagcaagatataaactcacaggttaattcagtatacatgtgcccactgaagaaaaatttaaatgaaacaccttgtagtttacccacagcagaaataggcaacaaaaaaa

SEQ ID NO: 702 - DNA, 200 bp, Lawsonia intracellularis
acgattctgaagagaatcatcctacagtagaacaaatagatgatatattacaagaaacagaaatagaacaaacaaatgatacattatccaaggcatcacctgctacaaatccaaaatttgctacacaaaaacaacaagtagtaagcatattaccttcaaaacatatctcactattaaaaaaaattataaaaccatcacag

SEQ ID NO: 703 - DNA, 200 bp, Lawsonia intracellularis
cattcatctaaaaatcgtccttcttctgttgcaaaggctataataggtatccctggcctacctttatatgcagtaaatctatatgggcaaagaggagatgcaccatcaggaggtgataaaaaaccatctggaactgaaggaaacaatagttcctctgatgatgaagaaaaagaagaaaaaaatcattctcattatgactc

SEQ ID NO: 704 - DNA, 200 bp, Lawsonia intracellularis
tgagataaatgaacaggataaacatacagataaaggggaaaaatcagatttagttggagctgtgggaggtacatctgataattttacaaatctagatggtaataaaagtgatggctctaatggctttgaagttcttgatctcccttctcataaccattctgaaccatggcaaaaacttattgttgttgacgatgaatcat

SEQ ID NO: 705 - DNA, 200 bp, Lawsonia intracellularis
cacatgaatcacatactgaaaacagtacacaaaaaaatgaaagtgataacaatgcggaacctaagccacttaaagatctgtatgaacttggagagcactatccccctatgtttaaccaaccaaaacaagatatgagtatggggattataggacctggagatgaccttatacgtccattaataaatttttgtgagccacag

SEQ ID NO: 706 - DNA, 200 bp, Lawsonia intracellularis
tttcaacattataagtatatacatcatcaccaccatagtcatcaccaacatcgttaccaccaccaacaacaacaacatcatcatcatccactacatcatcattataaaataggaatccctctattatcacctaacaaaaataagcctggtccacttatgaatgaactaccaggaagacatcttcaaacaaaaaatccctc

SEQ ID NO: 707 - DNA, 200 bp, Lawsonia intracellularis
tatagataatggtggcaataataatgaacaacaaaaatttgatccatacaaaaggccatctaacaattctattgaagactccaaaaaagaaaacagtcaccactctaattcatcaaaacaatcatcacttggcctttcatgggaaaaagactttggacaatcaagtaatagaggaaaaaataagcacttagaagaacaaa

SEQ ID NO: 708 - DNA, 200 bp, Lawsonia intracellularis
atgatggagaacatagtaatagtagtaatgttagtattgcaccattgatgtcacattcatcatcaactggacaacaaaatacatctgttgaaaataatcaacattcaaatggtgagcaaaatcctccatcagtaggatgtgaacatagaggaccaatgtcaacctcaaaccattcgtctagctgttttgtgcaattaaac

SEQ ID NO: 709 - DNA, 200 bp, Lawsonia intracellularis
aaaagtggatctgactttaataacgaatctaatcagccatctggtccaaaaaaagaaatagtacaaagtataaattcatcacctgaatctgaacatactccatctaataactcgtcaaattctagcttcgaaaaatacttacacctttgttatagtagtgtaggaaatgaagcctctcatagtagtggtgagtcatctaa

SEQ ID NO: 710 - DNA, 200 bp, Lawsonia intracellularis
aaataatggaaacacgcaagaagaacacactttaatgccccataataacagtcccccagtatcacaatccttttatcctaaaaatgataatgaatcagaaaatgaagctagtagtgaatacagtagtagtgagtttagttttgaaaaagaaagaaattttgatcacttttcatcagaaaatggaaattctttagatggtt

SEQ ID NO: 711 - DNA, 200 bp, Lawsonia intracellularis
ttgaagttgttgaacatggtcctgggaatagcgcagaagtgtcaccatttaaaccaactgtacaaactggattcaaaggaactcctagtcctacaagaactggactacttttgcctccttcatcaagtgatgacagtaaatctttagaaggctcactaaaaagtggtggtgacagtaataatgatgaatcatctgactgg

SEQ ID NO: 712 - DNA, 200 bp, Lawsonia intracellularis
agctcttctaacagttttgacctaacttcagaaaataaaaagatatttcttgtacaaaccggaggtcatcctcaccgtcctccaaaaaaaaacgatacaaaacaacctcactctgaaccctcagaaaatccaaatggtgaagatggtggcattcagcaaaatgaaccctcctatggagaaaacgtcttatgttttactaa

SEQ ID NO: 713 - DNA, 200 bp, Lawsonia intracellularis
aagtagtggatctaaccattcacatccatcacatagagatcactacaatgagcatgaacaaaatcctccagatgaaactgaagatcattcagcccatcatcaatcgcaatcttctttaaatgataaaagtaaatcttcttcaaaatctcgttcatcaagcattggaagtaatagtggtagtagtattattcttcttaatg

SEQ ID NO: 714 - DNA, 200 bp, Lawsonia intracellularis
gcagtagttctggtgacagtttacttgaatatcctggaccagaggatgatgaaggtgactgtttaggtcgtgaatgtaaacgtaaacgtaatagtgacagtaatagtgaatctgattacagttgtagctttgaaaggctaggaaatagttcagctagttggatactacgaaatcatggtggaagccactctagcacaaaa

SEQ ID NO: 715 - DNA, 200 bp, Lawsonia intracellularis
agcaattctagttcaagtagttctattataattctagaagaaagtagcagtgaacattataataataatagagacagttcatatactgattctaatcaaggtaataacttcaacagctatgaagaagatactggtcatcaatctgaagatggaggaaacaaatcatcctcttctagcagcatacaaattctctctacaag

SEQ ID NO: 716 - DNA, 200 bp, Lawsonia intracellularis
taatgatagtatagattggcctaattctaggaataactctgagtctgaatacgatggtgtcaatgatgggatagcttggcctggatctgctaataattctggagatgaacataatagtgatgatgggatagactggcctaatcctaggaataactctgagcctgaacacgatgacagcgatgatgggatagcttggcctg

SEQ ID NO: 717 - DNA, 200 bp, Lawsonia intracellularis
ggtctgctaataattctgaagatgaacataatagtgatgatgagatagactggcctaatcctaggaataactctgagtctgaacacgatggtagcgatgatgggatagcttggcctgggtctgctaataattctgaaaatggtgatgatggaagcaaatctgattcagacagtcatccagaaggtgaatctaataacaat

SEQ ID NO: 718 - DNA, 200 bp, Lawsonia intracellularis
gatactgatggtggtaatcgtagtggtaatgacgagttatctgatggttactcaaattctagtggctcaaatggggagaacagttctctacagtatagacgtcctgtaatgttaggagctatgcccccagcacgagctacaccaagaagaggaaacccttcaggagctaacgtaaggcaagttctatctaaaacacctaa

SEQ ID NO: 719 - DNA, 200 bp, Lawsonia intracellularis
aaatctacaagcgacccaggccaaacgtccgccaatatctagtttagatagttatcgcaatgcatgtaaagcacttactcaagctattcatgctattgcacaaagttctcaacaagctatgcgttcactagctcttgctacaacgactgggtatccagatacaacaaaacgttttcgtatttttggttcagcaagcacaa

SEQ ID NO: 720 - DNA, 200 bp, Lawsonia intracellularis
aaaaaccttatcctaaaaaacatcaaccttatgctgtgactgttggtgttattgcaaatcctttctcagcaattaatcttggagtggcatatacctatacgcaacatacaactaaagatttccatatttccaacactgacgcactttttgaaggttctgcagcagggaaattacaaacaaatcacatctcactcattaca

SEQ ID NO: 721 - DNA, 200 bp, Lawsonia intracellularis
gcttggaatcctgaaggatatggcttaacaggctttttagaatatgcatatggtactggagatgctacacttattcgtaaatttgcatatgataatcttgcattcactgcaaaagggaaaacacgtacacatactgatggaggaacagcaagaattggatatagatttaaagtaacagaaactattgctgtcacaccata

SEQ ID NO: 722 - DNA, 200 bp, Lawsonia intracellularis
tggagaacttgcagctgttcgtgctcgatggaataactactcagaaaataaagggaaattcccagctaacataagtagtacaaaagaacttgtacgtgaggaacgcctaggaatagaaactcgatggcaaatagtagataactgtcaaatttatgcttggggagcatatatttctagtaaaaagaaaaatggtgtaggaa

SEQ ID NO: 723 - DNA, 200 bp, Lawsonia intracellularis
ttgaagcccttcttacaattgatgatcatactgaaaatatgactgtttcaaaatattcaagaaagcagtccatgggtgaaattggggcagctattgcaatcaaacctactgaacattttggtataagttttaatacaagtatacgaacaaaatcaaattcaaaagtcggcttagactcacaatatataggcacaagtata

SEQ ID NO: 724 - DNA, 200 bp, Lawsonia intracellularis
tggtatgcattttaggcatgaatcctgaatagaagacatactaacacatgcaactatgggaggaaggcaaatgaataccatgactataaaaagaaatattaaaaaccttgttaaactcatgttacacaccattaataaatcaaaaacaaaaagatttcagccttgtttgtcatatcagtgtttttatcatgatctgtttc

SEQ ID NO: 725 - DNA, 200 bp, Lawsonia intracellularis
atggtatattgccaatatatgctcctgtagtagtgaaaaatagtaatctattagtcttttaacataatactatggacttattttgggctatctgtcatggtaacaagctatacttataccgtaaaaataaggaacatccaataggtggattgattctgtatgtattgttaaacggtaaagtaaacttctaatgtcggtta

SEQ ID NO: 726 - DNA, 200 bp, Lawsonia intracellularis
actgacattagaacaccatgaagaaactcaaaatagtccatagtcatagtatttcttataattttggttggtatataaggatcaacacatgcatctactttttgtcacgcatgatattgatagtggaggagctgcaagaagtttatctatattagtacaacagcttgtaaaacgacataaaatcagtatcataacattta

SEQ ID NO: 727 - DNA, 200 bp, Lawsonia intracellularis
tttcacctgaaccagaaaaaccaacagctttgttatatcaacagctaggagtatctttatatcttttcccatggggatggcttccagtttcttttattggatgtgaacccaatattgaacatcatcaagaactatgcagtagacaacgtaagtatctcccagaggtaaaacatattggagaaacagcagacgttatttgt

SEQ ID NO: 728 - DNA, 200 bp, Lawsonia intracellularis
tttaatagttatgcaccaacaagtttagctccttactttcctggaaagcgaaaagtccttattgctagggaaataattgatacgtcagactatcataattataaaaaatgtacctctatgctaaagcaatatattaattttgctattgctatagggccacaagagtctagtcaattacaatcaatgggtatccctcactc

SEQ ID NO: 729 - DNA, 200 bp, Lawsonia intracellularis
tattgtttataatagcagttcacatataccatattttgaacctttttcttcatttcctcctacccgttttggaatgtttgctcaatttatccctacaaaaggacttgatatcctacttttagcttatgctgaccaagccgttatattaaaagaacgaaatgtacatttgcatctttttggcattaatttaaatatgccat

SEQ ID NO: 730 - DNA, 200 bp, Lawsonia intracellularis
caaagagtacccaagctatcagtgattttattcaatcttataaacttacagacttcattcatcttgagggatgggttaataatgtagaacagcatatggcagctatgcactgcatgatacgacctgatcgaacaggttcaccttggggaagagatatcattgaagctatgtctataggtagacctacaatcgcatctgga

SEQ ID NO: 731 - DNA, 200 bp, Lawsonia intracellularis
gaagaagatgtttttgtaaagaatggtagaacaggttatctctttccaccaaagaacgttaaaatccttggcaaaatacttgcacttctttcagaagaacctactgtcttagaaataatgggtaaaaatgcatttgaatttgcaaaagatcattttaatccagaaataaatagcacacacattgaacatattcttttaga

SEQ ID NO: 732 - DNA, 200 bp, Lawsonia intracellularis
ggaaatatagtcccatataagaataacaactacctctaaacatactataacctcttttgcatagcacccctccgtcaatagtaatcatagttctaggaaacaaaatattatttgatatcctaaaactatgattacttaaacttatttgactactcactatctatgatagaaaaactaaggtacagaatacgtatcctctt

SEQ ID NO: 733 - DNA, 200 bp, Lawsonia intracellularis
gcttatttaatagttaacaactaaatgatgatatctagcctaccaatgacacttgtaaaaaataacaggttactcagcatatgttcattatttctttttgatataacaagactacacactatattgaaagaaaaaacctgtttgctgttctttacatttattcttttgatcaaagcgccataggctatctaaacgtatag

SEQ ID NO: 734 - DNA, 200 bp, Lawsonia intracellularis
aaaatgtttctaataacttattttcataggataatccaacctcactccgaatatactgattatgtcttttaggaatagataaggtatattgacgactaatacctacttgagagcgtaattctttcattctgtgtttttttatgcttcttactacccatgtttggacatgcatattatcagtaatagcccaagaatggctt

SEQ ID NO: 735 - DNA, 200 bp, Lawsonia intracellularis
agtcccataaccttttctactactttttcgttattaccacttatttttgcagggaataagccagttatctcttcataaggactccatcctgatgacacaaacatactttcaacatatggcgtaagtaacattccatctactatttgaaaattgtacccaagtcgaataagtccaccatgtaatgtaatttttggactccc

SEQ ID NO: 736 - DNA, 200 bp, Lawsonia intracellularis
tttagaatatgttttaattccagcatgagtaaccattcttgtatttttcatatttccccagccacaacatcctgaaagatatccagtgaatcctacagcccctgtattccaagcaacaacagctgcaagactatctgtactggttattgctttagctgcaccaaaagaccaacctttttgcatcccataatactcttttg

SEQ ID NO: 737 - DNA, 200 bp, Lawsonia intracellularis
aaatatgtttgttatgttgatatgtaagaccaacattaagcatatctgtaggagttactaaaaatccgacattagctgctcgtaatgtatattctaagtttgatgtataactatcccattgtgtacttacataaaatgactttaataatggtaattgacttctatatgtcgttgaagaaagactacttttagagttattt

SEQ ID NO: 738 - DNA, 200 bp, Lawsonia intracellularis
tgcaatgacaaataacttttattcttatagatttgttttgctcttttcttaggatatgcagctggagcattaaacgatttcgatcttaagacaagcatccttaatatagtagaaacttgctcagatgtatctgacaaaagacattgcatcccttgcagcgaagatatttccccttgaatgttataacttagtaaaaatct

SEQ ID NO: 739 - DNA, 200 bp, Lawsonia intracellularis
tgtctgtatgggaaagctaaatcctatagcaccacctccaggtggtggtgggcttccaggaggcctaccttgctccacagatgaatcactaggttcaattatttcaagtaatgcttctaatttctctagtagcttagctaaatgttgtaaaaatatctcttgtgcttgaataactctctgtgcttgtggatgttcttcta

SEQ ID NO: 740 - DNA, 200 bp, Lawsonia intracellularis
atacttcatgtagctcttctaataatttttcttgattaactttttgctcctgaatttcaactagtcttttctgtataaatattccccttaaaggacgagatgttgccataaggtcagaaagttccgtttgcaatgaacttatcactgttgtaagccaaatatttccagcagctacactcattctagataaggttctattt

SEQ ID NO: 741 - DNA, 200 bp, Lawsonia intracellularis
ctcactgttgactgatgtacattatttaaactttctaatgacttttgtaataaagatgttacctcatttgttgttgtttgcacatgttctggccactcttgacttggccctttttcataatcgtcccatagtagacctagtaagtgagagccaccagttgccccttcttcttgagaaaaaatccctcctgaagctccttc

SEQ ID NO: 742 - DNA, 200 bp, Lawsonia intracellularis
accaacatcctctccagaactggttggatgtcctccagaagctaggctatcatctaaagtactatctaaattaggtaatgcaactaataaatcttctagtaatgaaaactcttcttgctctacttctggattttcattttgattcccttgaacaatagctgctgctgccaaggcatgttgtgctaatagctcttctgtca

SEQ ID NO: 743 - DNA, 200 bp, Lawsonia intracellularis
ttaaatcttctggctctgcatatagatctggatcctcagcacatgctacctgttgagtatacatacaaaaaaaacataatagtatccctacagtaaaagaattagtaatagtatcccatctatgtatgactttattttgtaaaaaaaccttatttttatacatataaaaaatatacataatggtataatgacatatagat

SEQ ID NO: 744 - DNA, 200 bp, Lawsonia intracellularis
aattaaataaaaaatttttatattcttgaatcataaaataaaatggttatccttataagtataaggcaatgtatgcaatatacattatataacaacgtacattatatgtaaaaatagttactttatgaataatatccataaagtaactattttttattgacactttaaattcataaaaaggaaataatacatacgtatat

SEQ ID NO: 745 - DNA, 200 bp, Lawsonia intracellularis
atgttataaacatataatctatattaaatacgtatagtatgtttaacttgataattaaaaacaatagattaaaaaattatctatttataataataaatttttttcttattttcaagaagtattataaaaaagcataacaacataaaaatagttataaaatatcaaaagttatattgaaggtgcattcttatactactgtt

SEQ ID NO: 746 - DNA, 200 bp, Lawsonia intracellularis
cccaggttgtttatctgcttccaaccgatgattcccactaatattgatatgtgttctgtctgagagttgtatatcataagacattcctatttctttccaaaaggatgtttttctaacgcttggaacagacaaggaacaaagataaaaagggccatatgacagtctagacgtcagcttgtttatcttgcaagtattcaagc

SEQ ID NO: 747 - DNA, 200 bp, Lawsonia intracellularis
caaaaccaagccatgtctgtaaagctgaattgtatgtacatttccaaaaagaagtaattcctattcctctttctagctgcacttccttattgttgtttatcttagataataaatatcctctctgttcttcatagggttttctttcaacaatactcattacaccttccacataaggagtaagtagtatgtcttccactatt

SEQ ID NO: 748 - DNA, 200 bp, Lawsonia intracellularis
ctaacattataacctaatcgtactaatgcaccatagattgtagcttcagagttacctttaaaagaagttcctgaaggattaaaagaacgtattgtttttatatgaccccaaccataacaactagaaaaaaatcctgtaaaaccttgtccatccgtattccaagctacagtagctaaaaattttgtaatattagattttgt

SEQ ID NO: 749 - DNA, 200 bp, Lawsonia intracellularis
atttactttattaatagatgtatctgtctctactatcttgtacttattagataaatctttataattatatgaaaaacccatagttacatttggtattggatttacaactattccaacttgtgtactatgttgtttatctaaatatatattgtactcttctaatgaagtaaataggttacaggaaaaagttattggatata

SEQ ID NO: 750 - DNA, 200 bp, Lawsonia intracellularis
aaaaatagtgtagcttttcttttttttctacaacttttgtatttctatgaaactttttatgtctcctcaaatcttgaggtaaatatatagtgtttacctttgaaaaattagaactcatttgaatctttgaaactatgtctcttaatgcatgtgatacatgagatgatgtatcaaaaaggacatactgtaatccttgtaat

SEQ ID NO: 751 - DNA, 200 bp, Lawsonia intracellularis
gatctaaactggtctaaatatccataaccatgagtaaaagtagctatcccacctgctcctcctgggccttgtatattaaaaccatcctcttcttgacctgcattgcctcctggtggtgctatcatccctagttgatacaaagtttgaagtatttgctcttgcagcacttctatttgactttgtgtactatttacttgttc

SEQ ID NO: 752 - DNA, 200 bp, Lawsonia intracellularis
ttctagttgttcttgctggtgtgtaatactaagagcttgctctatagtttcagctgattgttcaactataggaatatgtaaaagagttctatattgttcacttaactgttgttgttgaacttttaaactcatagcttgattttccaaatctcctaattgtccatataaagacattaattgttgtaatagctgttgttgaa

SEQ ID NO: 753 - DNA, 200 bp, Lawsonia intracellularis
ttaattcttgttcttgttgttgtatgtattgttgctctacatattctaaagcacttaactctagttgcattgacatctctgataatatctcatcttgagattcatatgtgttattagaataagtactatcagttgcaaatgtatatttataaataataaaaatgtatacacaagaacaaataaatacaataataaaagtt

SEQ ID NO: 754 - DNA, 200 bp, Lawsonia intracellularis
ttataaaatatagtagtatattttttacaataaaaaaattgtataagtactattttttgtaagtcatatatatatatatttctaacttcatatatgaatttagaaaataatatataaaaatataaaaagaattttaatatttgttccatattattgacctaagatatgtataaataaaaaaataactgtataaataatat

SEQ ID NO: 755 - DNA, 200 bp, Lawsonia intracellularis
tcttttgtaattagtataaagatactccaataatttcttattaattagaaaacttatttaagtaataagcatattgtaataatctattaatagactataaaaattataagttttctttttaaagaaaaagaataggagatggatgtatctactagaaggttttagttgaagatgagaatttgtttatacttatatccata

SEQ ID NO: 756 - DNA, 200 bp, Lawsonia intracellularis
aataattattttactatttctataactagataattatctataactctatatagtgagaaaaaggaacatataatagaaaagaaaaatatagatagtaatatgtaagacaaaatagtaaaaaataaatactataaaaaatctataatctttagccttattagtgaaaataatataacaaagttttatattgtgttcattaa

SEQ ID NO: 757 - DNA, 200 bp, Lawsonia intracellularis
ttttattaaaaacattaagataaagaacgcccttttaaaaaatatctgttttttctccagtgattattgcatatgagcttctaacctcttgtaaatattatattttaactcttgatgatacaaaagtgttggatgtctgaaatattggaagataaacttgttaatgtatatcttttatgatttgttgtaatctatgaatg

SEQ ID NO: 758 - DNA, 200 bp, Lawsonia intracellularis
aagaaaggtgaaacatttactttcaaatctagatggagaccaagattgttctcccatagtttctctttataaatattaattgtacaaggaagcatcccacttgttttactatatgtattcaaacctacttatgcaagtatattttctacctaagagataaataaaacttttttaaaataggtgtgttatatcctagcctg

SEQ ID NO: 759 - DNA, 200 bp, Lawsonia intracellularis
acaagtacaccatataatgtaatttctgatattacttatattttttatacccccatccacaacttcctataatatatcctgttactccctttgcttttagattatataccattacttctgaaaacacatgacctaataattagaatgtgaaaactaaaaaatagtatttcagctattttagcctgtttacgtatctgtct

SEQ ID NO: 760 - DNA, 200 bp, Lawsonia intracellularis
tttataacaactaatatgtattccaaactggctccataataaaaccaacttaacctgcacaaactttatgctctagccctaaggaatacatatcaataattctaaacagatatgtattattcaagtatcttttattgtacaataactcttttacattttgctgagataatccattaaatttttttattctgaaataactg

SEQ ID NO: 761 - DNA, 200 bp, Lawsonia intracellularis
ctgtagaagacatactcccttcaaattacatttcttttcttactgcatacttatttattgtactattaagtccattgatgatcctttaatctgctttaattctccttgaaagactccttgaaaattttgtagtaaacttaactgagcctcatgaataaataaaaactatgcagatgaaccaccaggcaaagatacatttt

SEQ ID NO: 762 - DNA, 200 bp, Lawsonia intracellularis
ctgctaactgagtagcaattttcagtggacggtttttaagtagtagttttttctcagtaacgtcaggttggtggtatttttatgatgcattagctttaccctgaattaatagctgttcttccatcaggagggaaaaatccttgctcaatttgctctaaaggagattgttcttcttcaattggtataaatatcgtttactc

SEQ ID NO: 763 - DNA, 200 bp, Lawsonia intracellularis
tctatgcttaaaaaaagaaaataaagaggaaacatattgtataacactaacctattgtgacttagaggatacctattgttcctcctattgaaacgattgctcttgagacacttgtaaactttctgtttgtactacctaagatagttgttcttgttcttctaatacaagttgtggtgactcaaaacatatttggtctattt

SEQ ID NO: 764 - DNA, 200 bp, Lawsonia intracellularis
attgaagacgaagcaatagttcactttcttcaccttcaagaagaggcatttcaataaatgaggtcggagacaaactttctatttcgcctaatgataaatataataaaatttctgtagcctcttctaatcctttttcatcccactgtgtatcagaaaattggataaacgaaaaatcaatattataaaaatgtaatcttttt

SEQ ID NO: 765 - DNA, 200 bp, Lawsonia intracellularis
tcttcaacagcactagaagattgtccttgattcactgacgtctgttcactcacttccaacttatctagagttgtttttacatcttgtaatgttacattatcttcaggatgctcctgagatagacttaattctttagttctttataaccctccttctgaaaaaactataaaggagaaggaggaagttggaggaggctctaa

SEQ ID NO: 766 - DNA, 200 bp, Lawsonia intracellularis
acacactctcttagcagccaaagtacaacttcttctatttcttttccgttgaactttaatatctctatgttctttattatcatgataactctttaattctttattctgtcttagttatttctgcttcaaaagaaacaatgcatttaaaaataatagtgttataaaataaaaattttacatctagttattaaaaaaaagaa

SEQ ID NO: 767 - DNA, 200 bp, Lawsonia intracellularis
agtatctcttataagagatactttctttttactatatctaactaaatgaataatagtatctaaattctaaaaagtaatagattaactaattataactattgcatattttagaataaatactgaaaatgaagtctcatttgaccagcatctaatttttgatcttttttgaatcgtaaacttccatgtaagtctaccttaca

SEQ ID NO: 768 - DNA, 200 bp, Lawsonia intracellularis
aaaatctgtcacattcatttcatataatgtaccacattcgctatagaaagatttcttcttatttcctggaacagatgtcttataaagcagtaatggagatgctaatggcatagatgtaatattacttgtggtatgctggacagtaccacctgcaacccatgtttgtaatatagctttatctgtaattttcatagaagttc

SEQ ID NO: 769 - DNA, 200 bp, Lawsonia intracellularis
gcagacctatagttttttcctgaaacttctctgtgtaaccactaatcacacatggtaaagagcctgaatcttccctatattgattccattttacaactatatgtgtggcttcaatatatgggacacaactaactttctttgaaagaggaaaggtatatccaagctgacctaaaactccacttaactggacatcaggactc

SEQ ID NO: 770 - DNA, 200 bp, Lawsonia intracellularis
ccttttgtcctcatttcttttccagcctgcataacctgacgagtatttttcatttgaccccaattatgacaacctgaaagatatcctgtaagtcctttttcttcagagttccaagctacaactgcagaaaatccatctagttccatattagcttttgctgatccaaaagacgtacctaattgtgctccatgatattcttt

SEQ ID NO: 771 - DNA, 200 bp, Lawsonia intracellularis
accatggttcttatgacgattgtatgtcaaaccaatactaacatttgatatagggttcattaatagaccgacttttcctgaggatactttattctcctgattagcaagatagctatctgtatatccaaaaaaatgacaagtatttaaaaacgataataggttacttgaatcactcataacctttttaacagacctttctt

SEQ ID NO: 772 - DNA, 200 bp, Lawsonia intracellularis
ttccacataaggacatacacgcttttttactttcttttgcaattagtgagcttgtttttttatcctttgtttcagcctgatataaacttgtttttaaaacaagtgtctttaaattagctgacatttgctccactgctccaaacaagacacattgtaatccttttaaagagccatattgtgactcatgattatagcctggt

SEQ ID NO: 773 - DNA, 200 bp, Lawsonia intracellularis
ataagcatcgatgacatatcacccctggaagatggactacctggagatttaggtggtgaagaagaactttgctttagacgcttaactactggcgataatgactcatcatctgagctatctgaagacgaacttggagcaggccgtttagtagttaaaggaccctgaacttcttcgcctatcacctctccttcttctagcgt

SEQ ID NO: 774 - DNA, 200 bp, Lawsonia intracellularis
atcactatctactcctgatggatgctctgatggagattttactgactcttctaaatcagaacctgaaccttcttctgcaataagaacagatggtgttgggcttgataagtatccttcaatagaagaacaactgcttccatcctcgtcctcttcttgaattgtgggtaaccctctactagaaccaactacacctgtttggg

SEQ ID NO: 775 - DNA, 200 bp, Lawsonia intracellularis
aaacttcacttaaagaagatgattgttgttgttgttgctgtaagaaaaattgagaacgttgctcttgggatacatactcatctctccatatgtcaccctcttctccctcaagaggcggcatagaatcatctgaaccttcgtcctctctacttaatggtgaacaaggacttttattttcctctccatgaggaggagatata

SEQ ID NO: 776 - DNA, 200 bp, Lawsonia intracellularis
attacagagctacgacttgttgatgactgtgattgtgcttcctgacccagtaaggcttcttgaaataaagctgcaacttgttgggcttctagcttttcaatttctactttctgaatctgatgttgagccatcttcaccatgctttgtaaaaattgaacttgacgtactgcacaagtttttaatttatccatctgctgttg

SEQ ID NO: 777 - DNA, 200 bp, Lawsonia intracellularis
atgtctttttctttcttgctgtaatttttcttttaactttttaactttttttttcaaattgctaataacctcttgttgcatttgttcttcagaggatgttattataacttcctgtacctcttcactttccgaaagaaaaaacatctctgatgtacctaatgctgcacttgtagaagatgtactagactcagaactttggc

SEQ ID NO: 778 - DNA, 200 bp, Lawsonia intracellularis
tagatgattgtgatgagtcttcaccagtttgtactgccttatctataaattctttagaagaactactttcctcttgaagaggaaacacctgctcttttacatttgatgtctcttgttcccatagtaataaaaattgattacgactatcactaccaggatttccttcctcttcctcagaagaagaggaactttcttctgac

SEQ ID NO: 779 - DNA, 200 bp, Lawsonia intracellularis
tgttgttctactgaactatctgaatttgtagatagttggcgtgtaggttttactgaaaaagaatactcataattaaataaaatgtaacacatacatagtaatattattatacagtagtttttacattttttagggaataatgataaatagttatgagtatgttcatatatattatgtataatgttatattgatgtgataa

SEQ ID NO: 780 - DNA, 200 bp, Lawsonia intracellularis
atccattttttattcccaactaaataaaaatttttatgtaaagcataatttatattatataaaaagaaaaaaatttctttatatttaaaaaagaatagtataaacaagaatacttctatcttattactataatatagaattttattcgtcttttataagattaaattattcaatataaataaatgactaaagaaaaaaat

SEQ ID NO: 781 - DNA, 200 bp, Lawsonia intracellularis
atttttatacatactaatatagtatacttatattaaaacgtgtacaaaaagttacactgtgtttgtatataaaaaatatttttcatattatgtaatgtaaaacaattccttgcatgtatagtgagcacatcattaatagtgtactcaaaagagataccagtttcactatagatatcgttttttttgtaaccttgtagata

SEQ ID NO: 782 - DNA, 200 bp, Lawsonia intracellularis
tgatttatacagaggtttagattgtagcagcgatgatatatttaatatatttaggttctgttgtctataatttttttcaaaccaaaactgaattgaagaaaaatctttaattttactgtaaagacaaagacctataacatgatcatatacactttctttatgtttatctgatagatagaaaaacggacttaattctttat

SEQ ID NO: 783 - DNA, 200 bp, Lawsonia intracellularis
agtaactatttgatgttcctactacatatgatgagccaatatatggcattagagaatgttcagatcctaaaggtatcttgtaccctaactgagctaatactccactaaacctgactggtatactttttttcttggttatattaaatggcattgattgtatggtatgcatttgcccccagtaatgagcacccatgacacaa

SEQ ID NO: 784 - DNA, 200 bp, Lawsonia intracellularis
cctgttagaccacacttatttttaccccaagaaagtgtagcaagcagtccttttatctgtacttttgctgctatagatgaaagtataccattgtgtattttagaattatacttgttatgatcataccctaaaccaagagttatgtttgaaattgtatttgaaacataacttctctttctagtttgtggtcttgttgatat

SEQ ID NO: 785 - DNA, 200 bp, Lawsonia intracellularis
acagaaaggacaatccttcatcattccaagcatagactgcatcctcttatcacttaagggtatgtttgggattactgtaacccccttatctttttttatgcgtcctgtacttgttctttcaagagtattaaaaaacttctcatctatatggttagataatttatcagatagattatttgttattgttgttgctaactgct

SEQ ID NO: 786 - DNA, 200 bp, Lawsonia intracellularis
taagctctattggaaatcgagctaacatatcatgaaaaacatattgtactcccaatagaggttccaattgtaaaacttttttatagatagcaactaaagaagatgttctatccttcgatgactgaatattacgtgggaacaaatatacagaccttgaactttgagggtatggctgtgactcttcatcagaagcttcactt

SEQ ID NO: 787 - DNA, 200 bp, Lawsonia intracellularis
gatgcatcatagtccgatgattgtcctatctgtctttgtactaattgttgaggagatagctttgcttcttcgtcagaagaactacttaaatctgtttctaaacaacgcttacgcaaactagactctctttttttgggtggatcctttaatattacttcttgtagtatagaatttcccattcttatttctttattagggaa

SEQ ID NO: 788 - DNA, 200 bp, Lawsonia intracellularis
tggtggtagaggatgcccttgttgtcgagcttgttcaatcttctccacaagcattatacgaaatcttaacataaggtgctcattgaaaatactattatatataaactgttgactatttagtatacgttgaagatggtcattatttaatgctataatttctgatattccttcttgttgacctactattaactgcatttctt

SEQ ID NO: 789 - DNA, 200 bp, Lawsonia intracellularis
ctattgctacaatatttgcttgcaactcttgcattctacttgttattgattgtaagatgtatgttaattgtcctgttaatctttgttggttcaccttcatacgttgtatttcttcatagttaaatgaatcttctccctctctacttattgtatttaagtaaagatctatcatactattttgcgtagttaaactttctaaa

SEQ ID NO: 790 - DNA, 200 bp, Lawsonia intracellularis
tatgatgtttgtaattcgtcaaaatatagaaaattcatatttaataagttttttatatttatatattcttgttgtgcttgtataaattcactagctatattttgttgttcttgatgtgttattctagtgctagatacactcttctcattaacctttgctatactactacaagtatataacatagataataactgtgctaa

SEQ ID NO: 791 - DNA, 200 bp, Lawsonia intracellularis
aaaaaatatataatactttttatgtatatatctatataaaaaaattttatttgatgtatgtaaaaaatacagtatacaattttttaaaattgacatagtagtagacattttataatttttacttagagttaattagggaatatataattatgaaaaactatagtaatgtatagaatagttttactataatcattatataa

SEQ ID NO: 792 - DNA, 200 bp, Lawsonia intracellularis
taatattaatagacatattgaaaagaacattggatattttgagtatgtaatgtattattagtatagttgaatatactatttaaactcatacacattttatcagaaagtttcattgaataagacataccaagttcattttttatgaaccgcttttctaatactggtaaagtcattttatacacagggatagaaaaaagtaa

SEQ ID NO: 793 - DNA, 200 bp, Lawsonia intracellularis
tgatgttgctttcagcttagttgtatttgaacgaccaaaaatttttgaaatccaagcttgtatgttagattgtggatttatattccaatatccacgtaatccaacacttctttcccataacgcttctttataattactaatattactagacactactccataatgttccttataatttttccatcccaaagtaacaagca

SEQ ID NO: 794 - DNA, 200 bp, Lawsonia intracellularis
taccttccacataaggagtaagtctaataggtgatgaaatctgtatattatatcctaattgaaaaagtcccccattcaattcaatatctggcttactattaacactgattttctctcctacaaaaggaacatatcgtgtattgggcatatacccccaaccataacaacctatagcttgtcccatcaatcctgtctgctct

SEQ ID NO: 795 - DNA, 200 bp, Lawsonia intracellularis
gcattccatgaagcagccaaagaaagaatatttgttgttgtttttgccttagctgaaccaaaagagttatgtcgtactttaagcattctattttctaaaaaatcatatgatactccaagctgtaaccctgttacaggaaaaacaataacccctgcctggattgcatgtggcttatactctaaatttttataataaccttc

SEQ ID NO: 796 - DNA, 200 bp, Lawsonia intracellularis
aactgaagaaaacatatgataaggagcagataagtgagataataatgacaactgtggtaatgataaatcagatatcttcttttctttttttctaaaaatatcactatgaaaaaaatgaggtatattacattttgtttcatgtatgcaaaaggtatttctcaaagaccacatttttaaaatactcgagacttgtgtaattg

SEQ ID NO: 797 - DNA, 200 bp, Lawsonia intracellularis
cattcccaaagatacattgtaactcctggagagaactaacattacccaatatatcgtaacctgaaacaaaagctgcactcccttcccctagactaaaattcgccattgaagctgaagcacctcctgaaggcggtggtggtttaggtccttggtcttttccttttaatataactgaacgtagtccattttctgattctaat

SEQ ID NO: 798 - DNA, 200 bp, Lawsonia intracellularis
agtaacatcaatgccttttctaaattactttgcaactcctgcactaattctacattttttatatgccctcctgcacaagaggaaattttacttttcaaatcatcaagagcagcttctaattgtggtatttgatgttgtgcattacttaatctttgttgtattgcctctaataaataaggtattctaacatattgaggtat

SEQ ID NO: 799 - DNA, 200 bp, Lawsonia intracellularis
tgtcattaccatggatagaataagttgttgtgtggactgcaacttttctgtaacagactcttcaagcgcaagtaaatttgttattacattatgtctatcatggatatatttctgttggttttgtttaatttgatttatttttacttcatatttataagtattacttaataaattatttaaactatgaatatgttttgaaa

SEQ ID NO: 800 - DNA, 200 bp, Lawsonia intracellularis
catctattccattcttaatatcgttagttgctgtttgtaataatcttcttaccatactagactcattaattaacatattaaatatatcgttctgtactatagtaaatgtttctatatagctttcagtcattcttaatattgcatctgatgtatctactcttatatgagcttcatacatatattgtattaaattatttagt

SEQ ID NO: 801 - DNA, 200 bp, Lawsonia intracellularis
gatgttgaaatagattgtaattgtttcatacaccaattaaattcatcatatgtatctcttttacctatatcttcagaatacgaatttttataataacataaaaataaaagtataaaaataattgtaattaatctaaaatagttctttttaatagaaaaaaatttactatttatagtatgtatgtatgtatacacgtatct

SEQ ID NO: 802 - DNA, 200 bp, Lawsonia intracellularis
ttcctttaatgtaaaagaatatataaatttactgttacatatatataacgttatataacattttatataattttttcattatttaactctatgtactatgaaatttttatatataaaaataaaaacagtaatttatcatatctaatgatgtatactgataaagtaatcaaaagttactatttatatgaaatttttacatg

SEQ ID NO: 803 - DNA, 200 bp, Lawsonia intracellularis
taaatactatgtttatacagtatatgttataaaaattatatagaattaatacatatattgtaaagaaactctcatagttttatctgtaggtttttgaatatgcgaaaaaattataatactataaagtccaatagtacataagtctgatacatacacttcataattaatacctaattccgcatgttcataattttttctct

SEQ ID NO: 804 - DNA, 200 bp, Lawsonia intracellularis
ttagtggtacagtagtatgataactataatcagaaaataaagtatcagaatgcagtttacctatattatattgacctaaaacacctgcaatccatagttgaagttgtgtcttactagaaggagtatagctatgtcgtaaacctacacttttctcacaagaagtttctctatagtcactaactttacaacggacagggcct

SEQ ID NO: 805 - DNA, 200 bp, Lawsonia intracellularis
attgactcatgatatgcattccaagcaactgttgtaagcattccttcaatatagggagtaatcgtcattacatttgatattgggaaattatatcctatttgtaaaagcccaccactaagattaattctaggcatccctttagaactagcttttcccctaccatgtatgaaataacgtgtattatttatatctccccatcc

SEQ ID NO: 806 - DNA, 200 bp, Lawsonia intracellularis
acaacatcctgtaatgtgtcctgtaaatcccacgccatttgtattccaactaaaaatagaagaaaaaatatgtattgttgaacgtgtctttgttactagagtagaatcttctttatatttcctagggatttcatgaacatagtcataacctactcccatagtaaacttttctgtaggacacataacaaatcctatttgtg

SEQ ID NO: 807 - DNA, 200 bp, Lawsonia intracellularis
ctgagcaaagtttgtcctcaccatttgaactatatttatctgttgaactaaatccctggaatggaataaacacatctaaagatggctgagatgatgaaacaggctgctcaatagctgtcttacaaaagcgcagcttaggagaagtaacaatagtattaagctctctttcagcataattttgctttaaagatatagccata

SEQ ID NO: 808 - DNA, 200 bp, Lawsonia intracellularis
gtttttaatgatagcattcttagtagatttgaagcttgattaagcgtatttcctagagaacattgtaatccttgaagagcacaaaagttactttcaacatcataagctgtgaaagacgccgaagcacttcctaaagaagacccttcaagtgagccaacccccccccccctggagatgatggtggtggtgacgggggacgt

SEQ ID NO: 809 - DNA, 200 bp, Lawsonia intracellularis
gaagtttgatgactactatttcctgtaacaataagatagcattcagctacaatctcttccagttgcttgtttttctcttcaacctggctagccttgttctcaacaacagtatacaaagcctgtaagcaagaacgaagtctctttcttttttctataccattccatactgctactgacttctgatttatcaatgtcacttg

SEQ ID NO: 810 - DNA, 200 bp, Lawsonia intracellularis
ttgttgtagcacactattagtatatggttgaggtggttgtatgctaaagtttaaagtttcttcttctacccgttctaaagtactgcctataagttctagctgatctactgccaagtgttcgctatctctcacttgaaattgatgaaaattaactcgttgcaattgtaatagaatctgcctatgtatccttgctctatctt

SEQ ID NO: 811 - DNA, 200 bp, Lawsonia intracellularis
ttccctgggaataaactttaagaattgttttatatgctgattgtagtatcttgtctaaatctttaggtttcatctgacgtgcacttagtatagttgaccgtattccttgtatttctgtagtctgctcttctaatcttcttaatgtttctgtgcattgacgagatgtttctcccagtccctttaaatcatcatccattcgt

SEQ ID NO: 812 - DNA, 200 bp, Lawsonia intracellularis
gcacttaaagattcctgaattgacaatatttcttgtgcttgctgattagaagattctagtaaattcttcattttaagaaatttttgatatttcatttgttgtttaagacttatactgtcatcagcaaatgtttcttttacattaaaaatagaaaataataagaatatagttattatttgtaataaactatatgtatattt

SEQ ID NO: 813 - DNA, 200 bp, Lawsonia intracellularis
ttttcaaaaatattttttatatgtaaaaaaaagtacaacatatttttgcaacataatatagtacatattctaactaataatatatatatataattttattataaaaagataaattatgtatttttatcattaagtaaattacttttaaaagtaactatatttaaacaattaaatagtatactttttattaaatattatta

SEQ ID NO: 814 - DNA, 200 bp, Lawsonia intracellularis
atttacatatagcatgttaatatatatatattaatataatgatatatatatataataactattaattttataatttaagtgtgttaatatatagattttatatggaaaataatataatttaaaatagttattgatctatatcaaaatctatttctttttaataagagcttattagtataagctttaaacactataattta

SEQ ID NO: 815 - DNA, 200 bp, Lawsonia intracellularis
tatacatataaaataacagtttttttaaatttttaaattacaaaaaaatattatataaacatataagtatagtttatctatattatgtatgtataaaaataactatattatatagtttatatttataacgtactaaaaaacatatgaatactacattttaatagaattttacttcattaatattagatataaatatacta

SEQ ID NO: 816 - DNA, 200 bp, Lawsonia intracellularis
ttatagtagtatatagttaacttcataaatagcttttctatatttagaataaattctatattgaacatatcttccctatgtaagaagaatatgaattctaatggaataaagaaataaaactaaaaagatagatccagttataactaaagatataatcaaaaaaaatagacaaaaaatagatacaatacaaatataaaaat

SEQ ID NO: 817 - DNA, 200 bp, Lawsonia intracellularis
gtaatgtgtaataaaaatatttagttacggactacaaaatttatttatgtattgattaagaaatgttataatctatttatctttagttccagaagagattatatattctttatattataagacataacttgttttatcttttataacaagagatatttttttaacaacagttaataaacgtatcttattgtaaaacttgt

SEQ ID NO: 818 - DNA, 200 bp, Lawsonia intracellularis
ataactagtaacatcttttatgcttttagttacccttaacttactataaagctccatagataatgtatccattacatttgactcataagaaatccctgcctccctatggatatattgcttcttataaccaggaatagatattttattcctatagtcagataaactaagtggtttagaagctatttcacctgtattatgat

SEQ ID NO: 819 - DNA, 200 bp, Lawsonia intracellularis
ttgtaaaaatatgagaaccccaaaactgtagctgggaattatctgtaattttccattgattacgcaaacctatacttttctcacaaacatgaactttatgtccactcactttacaaggaataagacctgtatgttcttcatatggatcccatgctactgctaatctcatatattcaacatatggaataagaaaataattt

SEQ ID NO: 820 - DNA, 200 bp, Lawsonia intracellularis
tttcctagtaaaacgttatatcctagctgaataaatccaccactcatatgtatacttgaaatacctttagaaacactttcgttatcaaaaaaatgtattgtacgaatatttgttattttcccccacccataacaacctgctaaatgacctgaaaaaccttgatgttctttattccatgtcactgttgctaaaatgttatc

SEQ ID NO: 821 - DNA, 200 bp, Lawsonia intracellularis
tgtttctatctgagcttttgcagaaccatctactgagtctagtacaactccatagaaattttgagttttctttttgttattactatacaataaagataaacagagtccatcgataggtgttgtaaaaacccctgcttgtcttgaagaaatagtagtctctaaattagatatacgactatccatagatgcaataacatgcc

SEQ ID NO: 822 - DNA, 200 bp, Lawsonia intracellularis
attgctgcgaaaaaaataatgaattattcacagaagttggacgtatttcattatctgttgagtgacttcttcctattcctcctttaattttagtctgttttttactttgaaaagtatgaggttgtaactgattgtcgtccttacaacaaacacctaaaacattaatggatctaataatagatagtcgtaattgtgttgct

SEQ ID NO: 823 - DNA, 200 bp, Lawsonia intracellularis
aactgatcctctaaactcattaacgtactttgtaatccttgaagagaactgacttgtccatatgtgtaatatggcataagcatagaagaactccctggaggagagcctctatcagaaggtggtggagtatgagttagcttcctacgttttgttggcggtgatgacctttgagactcaccatctgatgttgaagattcatc

SEQ ID NO: 824 - DNA, 200 bp, Lawsonia intracellularis
gccagaggttaaacactcatcatctaatatctcctcatcactgctagaaagctcttcttgacattctaaagtcactcctgaactagatagatcctctactgaaggtgaaggctgtaaagttgagacaatctcagaagatggtcctggctgaggctcttgatttagtacattttggggaggatcatctcctaaaggagaca

SEQ ID NO: 825 - DNA, 200 bp, Lawsonia intracellularis
atggttccggaagaggatctccaaaatctgggaattgaaaagtctgctgtggcaatggtggtggtgatggtggtggatcaggtaaaagtggtaattcaagcacttgtggtgtaagtataggtataggaggatcaggattaccttctacacgcgctttcagtacttcaattcgatacctaagtagtttttgtttattcccc

SEQ ID NO: 826 - DNA, 200 bp, Lawsonia intracellularis
aagaaaatatttttatttttatgtcgtgatatagctacttccatttttcgtgcagttctttgttgatttgctgtatgtaacaccttattttcaatggaagccacaatttcttctggtacacttactactttaccctcattattagtaggtaaccctggttgacactctattactgcattagataaacgctccctagtctg

SEQ ID NO: 827 - DNA, 200 bp, Lawsonia intracellularis
acgatgcagtacttttgtatgttcactagctgtttcccatattttaagacatctttctacttctctattacacccttcagcttcgtccagtagaagatatatgtcacgaagactgctttcgacatctactaaaagcacaggttgtgttcgctgtatcacctctaatcttaaaaggttggcttctatagttgtaattttat

SEQ ID NO: 828 - DNA, 200 bp, Lawsonia intracellularis
tttcctgagtagaagtatatatatttaatggtgtcattgtaactacaatatctgaacgaagctcatcaaactcatttacttgtaatttgttatgtaaaatcagtttactcttcctatcactatttttatcttcatagcctatacgagcattatgagataacgatacttgagaacttattattacatacaaaaaaataaat

SEQ ID NO: 829 - DNA, 200 bp, Lawsonia intracellularis
gttcctattctagcatacttttttactttagtagtatctaatatttttacttcttttttaagaaagactctattaaaataggatataaaactacctaagagtaaatatatggctattgtttcatatatacatataatataaaatataataaatttatacattagttattttaaactaacctcatgaaatacttttttact

SEQ ID NO: 830 - DNA, 200 bp, Lawsonia intracellularis
ttaaaaaaatataatagttattagcaaaaactattaacaagttaatattttttgctagtgtataatatatttatatagataaatttttataattataagaattaaattatactattaatatagttataaaataatataattaaaaaaatgtatatagtataattattaaatataaaatataaaagttcattaaataccaa

SEQ ID NO: 831 - DNA, 200 bp, Lawsonia intracellularis
ccatgtataaaggtgtaaaatatattataaaatcataacatattatctatataaaaaagttatgtattataattacaattaaatattagtattacactaataacctactaataaaagtagaatactaactgattgtaatacagtaatagaaggtttacagaggaataaaaaactgaatattcagcaagtattaaacagtg

SEQ ID NO: 832 - DNA, 200 bp, Lawsonia intracellularis
ggtttagtataaagctagaattgtgttaaatataatacaaaattatatattgtcaactgtcttaaaaaattatatctttctatagttactgaatattttattttaatctatatactataaatagtatttacagtaactatccgtcttttttatcacttttatattcttttaataatcaatatgtataccttagatgaact

SEQ ID NO: 833 - DNA, 200 bp, Lawsonia intracellularis
gttgcattttgtatatggcgtttattactattaaattgggcgttactattcaaaacaatagtaaaaaaatcagtaagttttgaagagtatgataaccctagctcagttctcatatactttttcttatagtttggaactacaatagtatatgtatttggacctctagtcggttgagaagtaactttatctacatttgatgt

SEQ ID NO: 834 - DNA, 200 bp, Lawsonia intracellularis
tcctgatgtccttattccccaacactgtagctgagtagatgcagaaatgttccactgacaaaatagaccaatacttttttctaaacagacttctttatgactactaatagtacaaggaagtacacctatagtttctttatatgaatgccaacctactcttgataatatgctttcaatataaggaataatggctaactttt

SEQ ID NO: 835 - DNA, 200 bp, Lawsonia intracellularis
ttgataaaaggaaaatatatccaatttggatcattccaccatttaggtgtatgtctgtagagcctttagaacatgcttgattgtctgcatgagtaaaaaatcgagtattctttaactgtccccatccataataaccagcaagatgccctgtaaagcctgaaccacaaggataccaactaaaaatagtagaaagtccatct

SEQ ID NO: 836 - DNA, 200 bp, Lawsonia intracellularis
gtatctatataacttttaacagaacctattgctgttccaagctgtagtccactatgttcttgaacatcttttttatgacgatcatacaacaacttcactgtatatccgttatgaggagtaaacattactcctgcttggcttgaacgaattttatgttctaaatttttactgtaagagtctactcctccaaacactctata

SEQ ID NO: 837 - DNA, 200 bp, Lawsonia intracellularis
tggactacttatgttataggtatgttgaacagtgtcatactgaggaacagagctgtatctctttcttgatattaaatttgtaaggcaacattcattgtctttatcatactgttgttgtcgtgcatgttgcacaagtgattttaactctgttgaaactttttcagaaacatcacataaaatgtactgcatactttgaagag

SEQ ID NO: 838 - DNA, 200 bp, Lawsonia intracellularis
agcttatttgtcctccaaaactaaagcctgggataaatgacaaagaactatctgatgccccaccttttgaaggttgccttggtcgagcgccctgtaaaagatagcgttgctctaaagatatagactgttcagattgttgagtagaagaagcttcttcgctctccccttcagtacatgctgttgatttttgactaacatca

SEQ ID NO: 839 - DNA, 200 bp, Lawsonia intracellularis
ctttttgaggattcagagtgctcaatttcttctacttctccaagagtttcatctagtaatgcatttccaccaaaccaacttacatcatgtatttcccctcgttcagaagactcactatcttctctactatcatccaaagagaggagagccatatctacacttgctactatttctgctttgcttctcttttgcctcatagc

SEQ ID NO: 840 - DNA, 200 bp, Lawsonia intracellularis
ctcttctagataagggaaaaagggtggtctgctttgttgagcagagagggtttgacagtgagtatcatatgctatgaaggcatttgacaatacttctgtatagctccatgttagttcttgtagtattaactcttcgcgatgattcaatatgttatctggaattcttctttgcatctcctggtgttgttgtactaaattat

SEQ ID NO: 841 - DNA, 200 bp, Lawsonia intracellularis
gctctaattctactcgtagctgttctaaggcatctaatgctactctctcttctctttccaaacattctgcctcttcctcttcgtctataatttcttgtaggaatgcatcacttccatatagaaaatccatcattctattaaaatatgcgttaagttcttctctcctaactcgtagttgaaaacgagtcctaaacaccgga

SEQ ID NO: 842 - DNA, 200 bp, Lawsonia intracellularis
cgtagaattctagattcactttgttcaaagatattaaaaaaagattcactttgtccttctgctataagtcgttgatttatttcttgactcctcaatatttgttgttgtttttcctctatagatctttctttttcatgtcgctcctgactaacgttatttagtcgatcaagagcttcctctttatatgtatccatccaaca

SEQ ID NO: 843 - DNA, 200 bp, Lawsonia intracellularis
tttctgctcagcaacaagagaaggataggctataaaactttcaactttctgttttacattctgataatgagtaacttctctacattgtttttctatcatttcacatcgttttttctcttcttgtatttcctcttctctttccttcttctttcgatagcgtctattttcatatctatagttacattcttcactatgatttc

SEQ ID NO: 844 - DNA, 200 bp, Lawsonia intracellularis
tacccgtaacctcagcagcaaactcaatggagtctagggtattgtagaaacccatatcaataccagtagcaccttgctcttcttcttcaccttctgaagatgaagagtcagtttctacttgatccctttgaggtatgccacttagcctatccatagcaatagcatgatcatgcttagctgtgcataaaaaaataaagacc

SEQ ID NO: 845 - DNA, 200 bp, Lawsonia intracellularis
cctgctacaaaaatgtagtacgtcttcaataattttttttgaaaaagaaataggactgttaaagtataagaataacatatagtgatatatatatatatcataaacttattgaataacacttactattcctctatacaatatttagattagattttaaatacattaaatagatactaaaaggtatctataaatagatagtg

SEQ ID NO: 846 - DNA, 200 bp, Lawsonia intracellularis
acttttttataaagtaaaaatacgttataaaagtataaaaataataaatatgcctattgaataatgtctattgaataataaataactacttatatagtaagtactacattatagtagtagttgtttataaggaaaaaataattataatatatttttatatatgtcaaaaaaaaatgtactataataccaaaattaattat

SEQ ID NO: 847 - DNA, 200 bp, Lawsonia intracellularis
agagtacaattactataatacgtagctatgcttagtaaatgaagaatacataacggatataaagagtttatgttaaaaaaagtcagcaactaattactattataatatagttttgttgaaaatacctacttgaatatacaaacttttttcttttccaaaagttgttttcctatgtagtttaatagaaaggaataatttta

SEQ ID NO: 848 - DNA, 200 bp, Lawsonia intracellularis
tattatgcaataaacctatctatgctcttctatattgtttcttataatcaaggactaatcttcaaaatgtaaaagaggaaatattactgtactaaatgctaatccattaactttttgctttccaaatacttctacaaactatacttgtaatgatgatgtattggtaagcttataacaataacgtataccaatgcttcttc

SEQ ID NO: 849 - DNA, 200 bp, Lawsonia intracellularis
catactgctgttactattaatttgcaagaccttagccttctctttgtatgaactccattctatattgtaagaagtaatacgctttctaaaaaaataagcctaaataagcaagttcaccaattaactataccttagatgtacctttacaaataagttatcccttagttttatttagtgaacgaaaactctttacctcaccc

SEQ ID NO: 850 - DNA, 200 bp, Lawsonia intracellularis
aaaccaaaaaagctaactctgctataggtcctaatttatctatattaaaaaataataacagaaaaaacttttgtttttgctttgacagaaatatttattgtcctttcccatatagtacatatcttgtctcttcattatagtggttacatgcaaacccaactgttatactaggtataaaatcatatactacaccatattaa

SEQ ID NO: 851 - DNA, 200 bp, Lawsonia intracellularis
gcagattacactttatagtctaaacttctatgatagatttttatagaatcaaataagctacaaacttctcctgtatttttcttctattctaaagaaagtattgtttgaaatctattctttctagctacaagatgtataattgaagcaaaaaaatttgttttaatttgcagaagatcctgagttattaaaactaataattt

SEQ ID NO: 852 - DNA, 200 bp, Lawsonia intracellularis
taatacattgaaaactatccagcggttcctaataaaacacattgtaaatcttgtgatgaatgatttccagtttcgtcttgttccttaccattgttatttattgaggctgaatcattaaaatataacatacataactataggaagtgttataaaaacaaaagtcctccatgttgtgtcttaataagactatagttaattgt

SEQ ID NO: 853 - DNA, 200 bp, Lawsonia intracellularis
taaaatggatatacataattcttaataagattgtataaaatttttgaataacaaagacaacaaagtatatacataaataataataactatacaacttatgtaaataagatacatagtgtaaaaaaaagtaatggatacttcgctaataggatctataataaagggttatttaaaacacatattactcaaagtaataatag

SEQ ID NO: 854 - DNA, 200 bp, Lawsonia intracellularis
agatatgaagaatttcaagtaaaacaattaggtagcttattatagtgaacagatatgttacccttaataagctaccctctttatactgtcaaatcattatcattaataaaaatatttcatacaatatactgtagtataacacataattactatgtagtaatatactatagtcacataataaactattaatactcttaaaa

SEQ ID NO: 855 - DNA, 200 bp, Lawsonia intracellularis
catatactggaaatgtacatttacttgatgttgaggcctcttgttagacttatcaagttgtgcttttccttgaaggcctatctcaacatttcgtgttacctttgatttataagacattcctaattctgcttttgtactttgccttccatgggatggaatagaggcttcatacttagaatcataggctgctatcagtggtt

SEQ ID NO: 856 - DNA, 200 bp, Lawsonia intracellularis
ttacatgtaccttgttggtacttcgatagctagatacacctgctacccaggattgaatacaacttctttcagttacatcccagcgactgcgcaatcctatacttttctcaaacaccttttctctattactactcacttcacaaggcaaaggtcctgagttttccttatatccattccaggttacatttgaaaccatacat

SEQ ID NO: 857 - DNA, 200 bp, Lawsonia intracellularis
tcaacatatggagtaaatgacacttgttttgttattggaatagtgtaaccaagttggataagccctccacttaaactgatccctggagtaccttttgatgttacttgtgctccatcatgggtgaatgaacgttcgttctttaactctccccatccatagtaccctactacatgacctgtaaatccttgtcctctaggatt

SEQ ID NO: 858 - DNA, 200 bp, Lawsonia intracellularis
ccatgcaaccaacatacttagtccatctagctcagccttactttttgcagaaccacttcctgcactaaaggatattccttgatattccttgcctgtatctttatatcgattataggctaatccaacacttaatccatccttaggggttacaagaagtcctacctgacttgaacctagtttacattccagatttgtatctt

SEQ ID NO: 859 - DNA, 200 bp, Lawsonia intracellularis
tagtgtcagtaaacccaatcacttggtatggcattaactcttgaaaagcactctcctgctgtaatgcttgcatacctatctgtttcttcttttttatagaagcactactatcattcagctgaagaacatcatctttcaccatagcattgttctgtacttttagtgctaaccctttcagagtaaaggcaacttgctcagat

SEQ ID NO: 860 - DNA, 200 bp, Lawsonia intracellularis
acatcaagtaaaatagcttgcataccatagagagagcttatatgtccttctagactataccctgggataaatgttgctttacctcctggtccacccctagatgtatctttccctctcaattttggacgtgctccttctgtagaatagtcatgtgaatctcccccctctgcctgaggttgtgtctctcctgattgtgaggt

SEQ ID NO: 861 - DNA, 200 bp, Lawsonia intracellularis
ttgtgcttgattacctggagtttgctgtacttgttgttgttgttgttgttgttgtgaatcttcttggggaccaacctctcctggtgactcttgatgagttacctcctgctcttgatcagatgctgtagcttgagaggaaccctcaccactttgatccaaaacattatcaggtaaagaatgagaccctgcttcactagtag

SEQ ID NO: 862 - DNA, 200 bp, Lawsonia intracellularis
tagctgttgtttcttcttctttctgacctgttgtactagaaggtgtactatcattccatggtcgtaaactatcatctcttaaaggagtagggtgatgatgaatccttgtaagatacctattatcaatttgagttactcgactactaattattggttgttcttcactctcgctttcatcttcactatcatcaatgtcaaca

SEQ ID NO: 863 - DNA, 200 bp, Lawsonia intracellularis
tcagaaaattcacattcttctaatgataccttagctactgtctctttttttacaccctcttcaacatacccccttttctccaatactaatctacagttacgctctatttctgctgcttcttttatattgcgttctctagacttttcctgtacccaatcttgtgcgttctttttagtatatagagtaaagggacgatagat

SEQ ID NO: 864 - DNA, 200 bp, Lawsonia intracellularis
ttcaggagaacgaatgcttgcatcatctattaaatctattttgaactcattagggcttacgtcaatcttcattatactaagacgactctggagttctgtcttttcctgtgtaattacatcacgatcccctaatttttgtaacaaacaaagcatttctctatctagttcacctcctacattttgaatttctgacaattttt

SEQ ID NO: 865 - DNA, 200 bp, Lawsonia intracellularis
tttgaagaactttaacacttgctccatacattttttctagttctgcatcataaacttttagctcttcttctttttcctgtaactgttttgatactttagggtattcatctttatgttgataaataggctcctgtaatacgtatttaacattcttaaactttctatcatacatttctttgcatgctctattaacttcactt

SEQ ID NO: 866 - DNA, 200 bp, Lawsonia intracellularis
aattgtttattaaaatcttcatcctctttttctcctccataaacgcctgcttaggtgacattttttcaccacttaatgctgccttgttcctattattgtgcccattaacccacctctctctaactaattttaactgtcttacttgatcatttcgtctacgttcttctcttaatcttctttctccttctcttagccttctt

SEQ ID NO: 867 - DNA, 200 bp, Lawsonia intracellularis
tcttcttcttgaacctctgctcttacttgttcccttctatactcttctcgttctaaccatgcttctcttattgcttcttcctctcttcttttaagtttttcctcttctaattctccccccatatctaacgactgtaaaaagttagcaaagtctctatctttaattttatcaaaccaactttttggcctaacaaatgctct

SEQ ID NO: 868 - DNA, 200 bp, Lawsonia intracellularis
gtcttttatacttcctgtagcaccttgtaacttctcttcatcactgcttggagaagattcctgttgagacttctttatactcttttttgatggattaggtttgtcctgtccattcatggcaaatgctgtaggattaaaatacataacccagcttaataaaaaaaatattgctgtatacttataatgacattgtcctaatc

SEQ ID NO: 869 - DNA, 200 bp, Lawsonia intracellularis
tttttagaaagtttaaaaatttattatatctatgtataatgttttgtatttgtgtattaaaataaatagtagacactaatttatacattatttaaactccacaatagtatacaatactattgtatttattttttatttattaagtaaaattacatagttgttactatgtaacttatagtaattacaactttattatgata

SEQ ID NO: 870 - DNA, 200 bp, Lawsonia intracellularis
aacgatattacgaatgaataacttatgaaatgtatttgaaagtatttaaaagcatagtacaaaaaagtactatttatttagactgtagaagtatagttattataattaaataaataaggatatattttttaatatagttaaattaaacgtatataaattttaattagttatatatttgtagatagttaacgtaataaaaa

SEQ ID NO: 871 - DNA, 200 bp, Lawsonia intracellularis
tatattaaaaatattttatttattgtaaataaataaaatattgtcttattattagaaaataaaaattataataaaattaatttttattataatacatttataaaattatattacttatttagatacgtgtatgatgttttttaatatactctaatttagtattatataaaaaatattgatatctaaatgatgtactatag

SEQ ID NO: 872 - DNA, 200 bp, Lawsonia intracellularis
ttatataataatattttatcaacattattaagcatatcctttaaatgtacttttacttgttctaatgatttataatgacgtatattataattactatagtattattttgtatattcaaaaaggttcaatgtaaaaaaatttaataaaatagactttatatcatagcaaaaactcttcttttatttaataagagtctcctt

SEQ ID NO: 873 - DNA, 200 bp, Lawsonia intracellularis
tagatacgccttcttaaggaataaccattggtttactcttcctctgaagccatcctaacattggctgttctagaaatagtttcttcttgaaagaataaggtgtgtgtgtgtgtgtgtgtgtgtgtgtgtgtgtggagaaaatttcttactattcaaacattagctaaaaatatttttaaactagtgttatcctaactaag

SEQ ID NO: 874 - DNA, 200 bp, Lawsonia intracellularis
cattactatagagacatccctaaaaagagaacttatatagcctacactactttttattaataatggtaggctaaagataacgtcaagtgagaattatccaactttttcttgccaatctttgcaattacattcaagtaacttattaacgtagttgtaatttttgcttgatgagaaatgccaacctcaacttgtgcagactt

SEQ ID NO: 875 - DNA, 200 bp, Lawsonia intracellularis
tctatctataccaggtacaactgcctgatacttcttcattggagcacacagaaacatagatgttaactcggctattttatgataaccagtactataagcagtccacatttgcagttgagaattatttcctattttcccaatagctctcatccctatactattttgccataattgttctttatttttacttatactacatg

SEQ ID NO: 876 - DNA, 200 bp, Lawsonia intracellularis
caaaaggacttggtacttctttgtatccattccatgttacaacagaaaaaatattctcaatataaggtgttaaaaaccaattgttagctaatggcaaattatatccaagctggacaagcccaccacttaaatgaatcttagaacgcccttttgcttctaattctcttcctatgtagcctatagagcgatggttctttgta

SEQ ID NO: 877 - DNA, 200 bp, Lawsonia intracellularis
ttaccccagccataataacttgcaaactgtcctgtaaatcctgctttatctggattcaaggtaacaatacctgcaagcccttctacttttgtctttgctttagctatgccacacgctgaatctaactgtacttctttagaaaaagaaaaatatttattttgacgatgatacatcaaccctacatgaacatatggagtagg

SEQ ID NO: 878 - DNA, 200 bp, Lawsonia intracellularis
attcatagttaagcctaattgagctgaacgacttttacattctaaatttgattcataattatctgcaactatggaaaaatatcttaaagaacatggattctgtaattgtacatatgaacttattatgtcagaagatgcaatctgacttcttggtctagaatctatttctaatgactgtccagtagtatgtttattcgtat

SEQ ID NO: 879 - DNA, 200 bp, Lawsonia intracellularis
gttgtaatgctaataatcgtagtgtagttattactttctcagcggaacctagtaatactccttgcaatcctaaaagtgaatttacttgaccttcatggctataaccagggataaaaaagcatgtctctctttctggaaccaaaaacacatccccactcccccctgaaggacttcccttagttttttgctggtctgactga

SEQ ID NO: 880 - DNA, 200 bp, Lawsonia intracellularis
ctattaccacttgaatcttgtttattccctgcagtacccttatcactcccttgtgggttatgactttcacttttaccatgacactcagattcggaaagaagacactctcctcttgggatccatacctcttcctcttcctcttctatctcttcttcactactactactactactactaacaaaacaaagctttaggtattt

SEQ ID NO: 881 - DNA, 200 bp, Lawsonia intracellularis
ctggaaactactgttgctactagtatcactactaatactactactgctactactacatgtactttttaaagaagatacttctgtcagactacttgtagaacttgtgacacttcttccattcattctactttgatcataaacttctttaaacaaaggttttggttgttgagtaaccactgcggctatattattctctgccc

SEQ ID NO: 882 - DNA, 200 bp, Lawsonia intracellularis
ttgctgaacactcactatctctagctgtagaagcacccatcatacaaccataagctgcaccaatagtagaaccaacaccagcaccaagaacacatcctgcagaagctccagcaacaccacctccgacagcacctacagaactaccaacgatagaacctatagccatcccaccaaaaaaaccacagaaggtactttgataa

SEQ ID NO: 883 - DNA, 200 bp, Lawsonia intracellularis
catatactacagtcttccattggcccgtattgaatggcatctacagtgtcaggtggtctacttgtcctacctcgtaataaatcaggatcaccataaaaccggacatataatggaatattctctgatgaatttgagcttacacttccatctctgttcatagaaaaaacattgctgcttaacatatgcaaaaacaaaacaaa

SEQ ID NO: 884 - DNA, 200 bp, Lawsonia intracellularis
aaaagtaaagacgacatgacaccgcttactttttataatatgacaaaagaaaagatagaaagacgaaagtgaatatatttgatgagaaaaaatacaattttgaaacagaagaaatactatcattataataaaaaaatacttttttgttacttactatagtaattaataatagtatctaatgagagagaattactttttta

SEQ ID NO: 885 - DNA, 200 bp, Lawsonia intracellularis
tatctatacaagagaaagcctctataatgtaaaataaaactagatactgttattaattataacaaactacattagtgtatcttaaaaagatacaaggcttatctaagtaggaataaaaatataagaaaagaaactagataagatatctttatttactgatatttcaataaactgtcaaataaaaaatgatctaatttatt

SEQ ID NO: 886 - DNA, 200 bp, Lawsonia intracellularis
ggaattaatctgtttttttagccattataaataatttgtatattcaaaataaacactgtagatagtaagtcagtgttgtttgctgattctcctgttttccttttcaagacatatccaagaataaagaccaaaatctacatcatccataaagtctttatgctaagcaataccaattgttgcctttatatgctgtttttaga

SEQ ID NO: 887 - DNA, 200 bp, Lawsonia intracellularis
gcaggtacatatgtgtcatatttccattttaaaaaagaaagagttccaataaatatagaacacttttttatacttactttttacaaatagagtatttcaataaaataagtctatcctcttttggacagtatagatacttttttagtgtaaatacattaaagaaagactcatacttttttcttttattttatgaaccttat

SEQ ID NO: 888 - DNA, 200 bp, Lawsonia intracellularis
ctaaatgtatcattccatcaatgcctaactgcagagtatctgtaactgacatactgtatgatgctccaaattctatatgaacatactttctttcttgtaccgaaatataggattcatacttcttaataggcattactagaggtctacaagatacaccatctgtcctacgttcaccagaaatacaagctatccagctttgg

SEQ ID NO: 889 - DNA, 200 bp, Lawsonia intracellularis
atctgaaatccacttgttggcttccaatgatggcataatcctacactcctttctgctacatactcttcacttctacttatcttacatggtaacaatcctgaacgctcagtataggcatcccaattgaccatagacatcatcccttctatgtatggggtcagtattgtggtctttgacaaagagatgttataaccaacttg

SEQ ID NO: 890 - DNA, 200 bp, Lawsonia intracellularis
gatcagtcctccatttaagtagatatttggctttcctttagcacttattttactacctgcatggataaaggaacgagacgtcttcatcttaccccatccatgataacttgctatgtgaccagtcactcctccaccttctgaatttaacgctattactgctgagagtgcttcagactctgttttacttgtcacagaaccac

SEQ ID NO: 891 - DNA, 200 bp, Lawsonia intracellularis
ttcctgtacctagctgaataccttcaaaggacttcctaccttcattatgacgtgtataggctaatccagctgtcattccagggaaaagttctgctactaatcctgctcggcctgatcgtatcttcttctctaaattgcactcatacttatccgtaaaggcaaacattcgacaaatagatattccttgtgggttgttttga

SEQ ID NO: 892 - DNA, 200 bp, Lawsonia intracellularis
aactgaagatctgctttaagtaccctatttggaccttgcaacttttgagattttttccctaattgtagagatgctgctgcatcagatggtattctatgtgctttaagggctaacatctttaaagtactagaaacctgtgcagatggacctgctaagatatactgcatacttaataaagagctaatttggcctccacgatt

SEQ ID NO: 893 - DNA, 200 bp, Lawsonia intracellularis
atatcctggaagaaaaaagatctcttcatatactgttccttcagaagatctccgactggatccttctccctgttcactattgttgtttactggagaattaatacgttgtggttggttagttacaacttgttgtctatgagaaaagtcaactagttcatatccttcatcttcatctgataaaaattgtctatttaatacca

SEQ ID NO: 894 - DNA, 200 bp, Lawsonia intracellularis
tatattctaatctttgttgagctgtatgaatacgttcatttttttcttctactttattagttaagtagccaaatatactacccaataaacaacaagtaaggccacaacaacccattgttattgcggttgtttgtgttattccttctatagaggatgcaacagtagttaacgtatgcccactagtcatagcagttgctagt

SEQ ID NO: 895 - DNA, 200 bp, Lawsonia intracellularis
ggagtagggaccgtaaatatcatctctgtaggagcaacagttggagtacataattctattagttttcctaccccataaccaacagctatacttatagctccacaacatcctccttgggctgctgcaactgcatatgtttgtttatttttacaacaggttttacaacatggacaataatcgttaatacttttatttgcctc

SEQ ID NO: 896 - DNA, 200 bp, Lawsonia intracellularis
atctataacaactaaactatgtttttttatatagtcttcatatacatctgcagatatagatactcctttaatatctactactgtgcaaggagtttcttcttcactatgttgttcggtgttacctagtgttctatggtacaaattaaattcttcattttctctattcatggcatgaatatctctaagaaaaataaataaaa

SEQ ID NO: 897 - DNA, 200 bp, Lawsonia intracellularis
ataaacaataaataactaatgtaagatattttttattataatatatattataatactgataagtattcttatatattagactatattttttatatttattttctaataaataaatatatttaatgtaataaataattatacaatatatttttataattattctatattttagaagcatattaattatcctatttttatag

SEQ ID NO: 898 - DNA, 200 bp, Lawsonia intracellularis
tataaaatttttaactatataaaattattaaaaattttctatgtaagatattatttataaataacgatatatgtttactttatttatagataaaatatataaataaaagttaacaaactatgttaattagttatataagagtaatagttataatagtgattaaatatgttaaaatacatactgtacatatgtatttattt

SEQ ID NO: 899 - DNA, 200 bp, Lawsonia intracellularis
gttgattatgtagcttttgtctttttacaaaagaaaacaacattgttgctcccgtaaaaagactatctgtaatctttgatacgtaggttgctccacactctgctcttaggtagttcttatttctcattgggacagaaacttcatacctcttcataggtgctacaagcggttgtaaacttacattcgatgatgtttgagac

SEQ ID NO: 900 - DNA, 200 bp, Lawsonia intracellularis
cctgagatgcctgatatccatgtttgcaaaatagaactctctgaaaccctccagtcacttcgcaatcctatacttttctcaaatatactctcactgctttcgctcagtttacatggaagatctcctcttttttcattgtaaggcttccactttgctatcgataacactccttcaacatatggcgttactgaacaactctt

SEQ ID NO: 901 - DNA, 200 bp, Lawsonia intracellularis
tgatatatataaattataaccaatttgaaccaaccctccagctatacttatagctggacttccacttgaggatgtttctctacctgcatgggtaaaaaatcgcttattctttactgttccccatccatagcaacttgcaaaatgtcctgtaattcctggacgatctgcattaaatgtaacaactgctgctatactttcta

SEQ ID NO: 902 - DNA, 200 bp, Lawsonia intracellularis
tctctgactttgctttaacagaacctctacctttacctagttgcatccctgtatattcttttttttcatcattgtgacgactatatgtcaaaccaaagtgtactccattgcataactcagcaattataccagcttgacctgaacgtactttacgttccagatttgccttataatcatctgtaaatgcaaatacatagtaa

SEQ ID NO: 903 - DNA, 200 bp, Lawsonia intracellularis
ggaatgtgtttttgcttctggttagcaaaattttttgttgcttttaatagttttccataattggcaatagatggtgaggatactttattaccttgaagagacaagtacatttgtggaattttttcataagcttttaacgccagtcttcgcaacttttgggggacttgtatagaaacgcctgtcaaaacgcattgcatacc

SEQ ID NO: 904 - DNA, 200 bp, Lawsonia intracellularis
caaaagtgaccctacttgcccctcgtagctataccctggtattaattcaactgcgtaagtccagacatcttcatatattggatcagtatcttgctctccccatcttgatctattttgtaatccctctgttccttggtcacctctttgactacttcttaaaatactgcctctagtactggaagctcctacactagctgaag

SEQ ID NO: 905 - DNA, 200 bp, Lawsonia intracellularis
cacccactgctactggctgttctgtcactattacgcctcttaagtgtgctgaaggtcctgctgctactgaaggttgagtagtaactggttgcccttgatgacctacaagtatagaacgccttcttccacggctaatactttcttctattaggctttgcattcgcctatctattgcttctaaattctcacgcttctcttta

SEQ ID NO: 906 - DNA, 200 bp, Lawsonia intracellularis
cttactataataccaccataataataagcagcaagcatagaaaaaaaataacaagctaaccctcccccactagtagcggctaacatcatagatgggtctgtaaattctgctatcacaccacctaatccaactccaaggccaccacaagcacctgcaattaggtttgtaatcaaacaacgagtcattcctatagaacaaat

SEQ ID NO: 907 - DNA, 200 bp, Lawsonia intracellularis
atttctacagcaattagactgaatagatgaggagttagtagttacgatatcttgattcccatgttcatctaaaaacatacaatataatgcgtcagggatagactctggtgagacactagtcacaccatcaccacctgtagctccaccttcaagtgattgtccaccacttagggaaatttcacttaaaggaatctgttcac

SEQ ID NO: 908 - DNA, 200 bp, Lawsonia intracellularis
caccttcaccattattcatagcaaatggctctgccaacacactaaaaaataaaaaagagctgaatacacctgtcaaaacttttttataatatgctcttttttgctgtttatcgtaacatatatactttttatgcaacttacttgctaataaatagcagactataatacaacttattgtaacatatatatatataatatta

SEQ ID NO: 909 - DNA, 200 bp, Lawsonia intracellularis
cataatgaaatgatgttattcattaaaatctatttcctttttattataaagttaatatatctaactatactaaaatagtaattagtgttcgataaaagtggtataaaattataaaatataataatatctatgtaatgagtagtagtgaagatgtattaaagatctagttaaaattagttaaagaaaaaatatgaggataa

SEQ ID NO: 910 - DNA, 200 bp, Lawsonia intracellularis
gtaatgtatagataaaaaataggattataattataaagattagtaattagcttatcaataaagactgatactataaccatccttaagatggaaaagttcattattattgtcaaatttattctatataatctatagttaaagtatactattaaatataatagtttgttttgtaatagattatatagaaattatatatttta

SEQ ID NO: 911 - DNA, 200 bp, Lawsonia intracellularis
atatgttatgtttattttataaaaatacttactactataaaaaatttctattttaatatatgaatttaaaaaactacgtataaaataatattaatatacatattgtatacatgcacttagttgttgattatataatttttgttcttttgtaaaagaacataacattgttgctccagtagaaagactatctgtaatcttta

SEQ ID NO: 912 - DNA, 200 bp, Lawsonia intracellularis
atatgtatgtcgccccacactctgttcttaagtaattctcatttctcatcgggacagaaacttcatacctcttcataggtgctacaagcggttgtaaacttatattcgatgatgtttgagtccctgaaattcctgagatccacatttgtaagacagtatcctctgagagcttccaattacttcgcaatcctatacttttc

SEQ ID NO: 913 - DNA, 200 bp, Lawsonia intracellularis
ccaaatatactctcattactttcactcagtttacatggaagaacccctcttttttcattataaggttcacatgttgccactgataacacaccttcaacatatggcgttactaaacaactctttgatatatataaattataaccaatttgaaccaaccctccagttatacttatagctggacttccacttgaggatgtttc

SEQ ID NO: 914 - DNA, 200 bp, Lawsonia intracellularis
tctacctgcatgggtaaaaaatcgcttattctttactgttccccatccatagcaacttgcaaaatgtcctgtaattcctggacgatctgcattaaatgtaacaactgctgctatactttctatctctgactttgctttgacagaacctctacctacatctagttgcatccctgtatattctttcttttcatcattgtgac

SEQ ID NO: 915 - DNA, 200 bp, Lawsonia intracellularis
gactatatatcaaaccaaagtgtactccagtacataactcagcaattacacctgtttggcttgaacgtactttacattccagatttgccttataatcatctgtaaatgcaaatacatggtaaggaatatgactttgcttctgtttagcaggatcttttactacttttaataactgtccataactgggaacagatgatgaa

SEQ ID NO: 916 - DNA, 200 bp, Lawsonia intracellularis
gatgctttattacctcgagtagacaggtacatttctggtattttttcataagctttcagcgcaagtcttcgtagcttttgaggaaactgtatagaaacacctgtcaaaacgcattgcatacccaaaagtgaacttacttgtccttcgtagctataccctggaataagattagtcgtataaaaacctatctcctcatatat

SEQ ID NO: 917 - DNA, 200 bp, Lawsonia intracellularis
aggttcttcatcaccaccgccaccaccagtaccaccacctattgtctcatatatatgctcatcaccactttcttcgtcagacccttctgaagaactgccctcctctcctctttgctgttctacaggggtataactgcctcctacactagacatacttcctcgtggtggttgactggtaacaacaggactacctgtactat

SEQ ID NO: 918 - DNA, 200 bp, Lawsonia intracellularis
cagaagatcccacaggccttggttgagtagtaacagactgacttcttacattaaatgctacatatggtccctgttcttccctgatgttacttctaatagcacttaatactctaagtctaaccatcctattctcgatcctatctaaggtattcccttgtctagtacagtaaccacaaatacaacccagaggaccacaaact

SEQ ID NO: 919 - DNA, 200 bp, Lawsonia intracellularis
atacagccagccagaccataagcaataggagctgctgatactgaaaaaccagtagtagtaatagtagtagggatagcagttggggcgatattacctagttttgatactagttctatacaacaacctactcctcctccaactaaactacctattgatgatgatatgcaagtaaacatacagcaccatttctcaaatacaga

SEQ ID NO: 920 - DNA, 200 bp, Lawsonia intracellularis
cttgcaacaacgcttagtaggaccaaaacaaggacaactaaaacttgaagatacatctgccagggtatctcctccgtgtgcattcaaaaatgcagcaaatagggcctcagattgaggatcagaagtaggctcttctccaccacttccatttcctgaacattcactatcataaggttggcctaagctatttctccttaacg

SEQ ID NO: 921 - DNA, 200 bp, Lawsonia intracellularis
aatgctgtctaccatcattttcaccattattcatagcaaatggctctcccagcacactaaaaaagaaaaaaaagctaaatactcctgtaaaaacctttttataaaaattattccttagttgcttattatagcctgtatttctttgctgactttttctaataaagaaataaaagatacatttaatatatatatatatcaca

SEQ ID NO: 922 - DNA, 200 bp, Lawsonia intracellularis
gaactactctatttatcaaaacgttatgttttacttcattcttttctctactaaatacatatcttcttaaaataccacatattttagaaacgcatttcttataagaaatatttgtgtgatgttattattaaattattaagatgaggtaaattaaccgattacttaatagtatacttactaattaagtaaaaaatactctg

SEQ ID NO: 923 - DNA, 200 bp, Lawsonia intracellularis
ttaaaaaaacagtcattttcttaagataactttgaaatgaggaagattaagtagagataaatatataactaaaaaagtattactgtaatcctaaaaccttaataactatcttattagtaagactattaaaataacatatatcaacttgtagttaaagtcaaatatagtataaaataacctacaacaaaataaacaaatta

SEQ ID NO: 924 - DNA, 200 bp, Lawsonia intracellularis
ctttcccatactcatttcaatcactatgtataaaaaatgttctatttaatatacataccgtaaggaaagaatcatctgttggcctccaaattttttggaattttcaaaacgtatcacactatttataccaaactccagattatttgttaaatttgctgtatatgatatccctaactctgtccttttgtaactactttcat

SEQ ID NO: 925 - DNA, 200 bp, Lawsonia intracellularis
ttttaggcactgatactttatatcttgaggcatgtttctgtattggctcacattttatgctatttgtttcaatatatcctgacacgcctgctatccaaatctgtatttgagacatacttgttgcttgccaatgacttcttaaacctatacttttctctattacttgttccttgttctcactcagtttacaggggagtggt

SEQ ID NO: 926 - DNA, 200 bp, Lawsonia intracellularis
cctgatacttctttataagggacccatttcaccaatgagaacactgtctctacgtaagatgtaattactacatgctttgaaactaacacattgtatcctacctgtattagttcaccagcaaagcgtatattaggtaatcctttagtatttacttctctattagcatgggtgaatgaacgtatattcttaaccttacccca

SEQ ID NO: 927 - DNA, 200 bp, Lawsonia intracellularis
accataagaactaattagctgacctgtaaagcctgcattatttgtatttgcaacaatgactgctgatagagcttctgtatctgtctttgtctttacctctcctgatcctttttctaaaagaatgcctttatattctcttgtatcacccttatgacaatcatatgtaagaccacaactaagaccagatattacatcaatca

SEQ ID NO: 928 - DNA, 200 bp, Lawsonia intracellularis
acactccagcttggcctgaacgaactttgtgttctaggtttgttttatagctatcaatattggcaaaaatattaaaaatactcaaacctaatgtttttatttgagtctcttcttgaatgtgttttactggaccttgaaacttctgtatctttgagtaaaaactcccctctagctgagtctctggtgtacaaacattctcc

SEQ ID NO: 929 - DNA, 200 bp, Lawsonia intracellularis
tgtgcctttaatcctaataattttagcatagttgaaatttgttcagaagtactaaataatgcctgttgtattcctataagagaactcatatggcttgcctcactatatcctgggatagaagcagggcatgaaactatccgtacaggttttagttgtggtacaacctctgaagtgtacttcccaccagtatactcctcctg

SEQ ID NO: 930 - DNA, 200 bp, Lawsonia intracellularis
tgatgtagcactttcctcttcaaaaacgtcagggtactcatagggatcccaaaactttcctggaggaggaaccattttataaactccaccttgtatataccaatcttcatcattttcatcccaaatacctaagtcaaatccactctctcttataaaaaaagaagcattcctaagctccgcagcaacaagctgtattcttt

SEQ ID NO: 931 - DNA, 200 bp, Lawsonia intracellularis
ctatttgctctctatctctattaggatcttcatcctttcttttttcaatatcatcaagcaactgtatcatctttacattttgtaagtttacccatgcctgatctcctctttgtttttctttctgcctttccagctttatcttttgtagttcttcttttttactgagtattcccaacacacaactacctgctgtagcaaga

SEQ ID NO: 932 - DNA, 200 bp, Lawsonia intracellularis
cctaaagataaacaagctacacgactgcttgttcctaaccctctactgactgcacctattgcgcttagagtaaaacctgtagtaagtgttgttattcctacagaacttcctaacacaccaccacatgttactttagctttttcccaatttctttttaaaaaagaactaatagataaagatggtgtattagaaagaccttt

SEQ ID NO: 933 - DNA, 200 bp, Lawsonia intracellularis
ttcactattatgcattgcaactacttcataagtgctacaaaaaataaaaataaaaatatagtaactattataatacatttattacaatacattttttttcattgtaactacttaaaaaatttaattaatataattatacataatttagaaaaaagactaaaataaaatcttatggaacaagatagttattttactatgtt

SEQ ID NO: 934 - DNA, 200 bp, Lawsonia intracellularis
gttccataaaaattataaataataaatttttatttattaaaaattataatgacataaatttattaaacaatatattattgttagataatattcattattattttcataaaaataggttttctataataatagtaatttatattttgtcaaagaaaatatttatatatgtaatcatctatattatagaaataagatcttta

SEQ ID NO: 935 - DNA, 200 bp, Lawsonia intracellularis
ataaattaaagataaaaattattttgtataaaaataaaaaaagatatacattttatatgtaaaaaatttattactatagaatatataataaaaaataaactatagatatgctataagtaatttctattaacaattactctataataatagtagtaacgataggataacatactgtattaatttagataatgatgtattat

SEQ ID NO: 936 - DNA, 200 bp, Lawsonia intracellularis
ccataaacaatatattagtaattataagtaaaaaagagttttagctgtttttctttactcttttttatattttcaaaagacatcataccattcatttccaaacaaaacctaggtgtaatatttattaaatatgataatccaacatctgtttttttatatcttgtctgttttaaagggactgaaatctcttgttttagacg

SEQ ID NO: 937 - DNA, 200 bp, Lawsonia intracellularis
tgagttaactatgttacagcttaacctcttcacatcacgatagcctgaaacagcagctatccataattgtacctgtaacatatctgatggtttccagtaactacatatacctatacttttttctattacttgttctttatttttagtcagttcacaagaaaaaagacttaatgattctttataagggccacactgtacaa

SEQ ID NO: 938 - DNA, 200 bp, Lawsonia intracellularis
ctgaacatgttgtctctatatatggagtaaatcttacttgttttgatacagaaaggttataccccaattgtactaaccctcctgctatacgtatatctggagagccttttgaacatacttccatagtgccatgcataaatgaacgtatattctttgctttaccccatccataacaacttacaagatgtcctgtaatacct

SEQ ID NO: 939 - DNA, 200 bp, Lawsonia intracellularis
gttctccctatattaaaagctaggccagttgataagctctctgtatttgtcctaacttttatcatctctgtccaagaattatttgggataccactatacatttccccatgattattatggcgcctatacactaatcctagatatacacctgatgtcatatccacaactatccctgcttgaccagaacctaatctatgctc

SEQ ID NO: 940 - DNA, 200 bp, Lawsonia intracellularis
aaaattagtctcataactatcaaatgtaacaaaatgatgaacatatctttttaagaatagactatcagttactttagctacacatgacggatattgaaacttttgaccttttgaataaacatatccttcttgttggtacatcatttccgacataagcatatgttcatgtgtttttaacaccacttgccttaaagcacttg

SEQ ID NO: 941 - DNA, 200 bp, Lawsonia intracellularis
ctgtctgttcagatatatccaataatgcagactgcatccctagtaatgaacgtatatggcttttaggattaaactccgaaagaaacccactatagtaagaagaagctgtatctctagagtctggttgtcttgttattacagcaggatttgaaatacctatagagcttggttgagttgtaattacacgtaatgctatctga

SEQ ID NO: 942 - DNA, 200 bp, Lawsonia intracellularis
gaactagtttcattttcatcttcactatctgagctctgctctccatctgtattttctgttctatgattacaggtagtttgataacacttcatacatccaatagatgtagcagaaactgctgctgctaacgtacacccagctccacaacctactaaacctgcatatgttggtgaaggcaactgtgtacatgtaatttttaa

SEQ ID NO: 943 - DNA, 200 bp, Lawsonia intracellularis
tgcccaatatagttcactctctaacttttttgtagcaatacaactagtaacacctgatgcagctccacaaatagcactctctgcagcaataatagcacaactacacatcccttctgaacatcttccacatctacgcttcatcctagcacaacacccttcccctctagggttcactccaactctttgaacactatgtgatg

SEQ ID NO: 944 - DNA, 200 bp, Lawsonia intracellularis
actgtagtagtggtgttctttcattaactggagaagggctatgttcattattgttattcataccgactgcttcagtaacacaaaaaaatatacaaaatggaataatagcattgacagctatcttcctataattaccttttattttttgtataacttgaaacattatttgtaaaaacaataaaggatgactattataggct

SEQ ID NO: 945 - DNA, 200 bp, Lawsonia intracellularis
cgtaacatacattttatactatgaactattttaatatatatgaaattatataaattaaataagatagtattcattatttagttagttggatgcatttatccatacataacctactttattcctttagtttatagtcaaacaattatctatttttataaacataatagtaataacatattaaaaaaacatattttctttaa

SEQ ID NO: 946 - DNA, 200 bp, Lawsonia intracellularis
cttctcaatgggtcatactctataaatgtaatattctttaacttctcaataataaaaatgagttatcccatacaaatgaattcaggctctgactatagtcaaagcctgaaaagattatcccatcaaaatgggcaaattaccctagtttataaaggtcagatagggattaatacctatattgtgcctgaagtgcaagatat

SEQ ID NO: 947 - DNA, 200 bp, Lawsonia intracellularis
tggctatcaatctttttagcttgcttaaaacgaagtataccattacatccgatttctaacatatctgtgatattgactacgtaagataaccccacttcagtccttgtatattgtttcttatttacaggaacagctgccttgtaagatggcatagaagtcgctaatggtctactatgtagtccactctttttatgagaacc

SEQ ID NO: 948 - DNA, 200 bp, Lawsonia intracellularis
tgaaatcccagctacccatgtttgcagttgtgagccacttgttacttcccagtgactacgtaaacctatacttttttctattatttgttctttattaccacttatttcacatgggagaatccctgataattcttgatatgcatcccacttaaccatagtatacatatactctacgtaaggagtaagtgtcacagattttg

SEQ ID NO: 949 - DNA, 200 bp, Lawsonia intracellularis
ctatagggatattatagcctacttgacctaccagccctgttaaactcatatctggtttacctttagatgttgtttcactatagccatgtgtaacagaacgattattttgcattttcccccaaccataataactagcaatatgaccagtaaaaccttttgtttcaggatttaaagctacgactgcagataatgcttcagtc

SEQ ID NO: 950 - DNA, 200 bp, Lawsonia intracellularis
tttgacctagactgcacaatacctgagcctgtatttaactgaatccctccatactccttacgtgtgtcagtatgacggttatatgctaagccaacacttataccaggaaatagttcagtaactactcctgcagaccctgaacgtaccttaaattccaagtttgactgataattatccatagatgcaaataccctgtaaga

SEQ ID NO: 951 - DNA, 200 bp, Lawsonia intracellularis
aataaagctaggcttataattcttaaaagtacttataaaaccccttgatggtccagagagccacttcttctgtaaaggaaaataattatcttccatgttgcccatagattcttgggaatattcatgtgctttcagtgttaacgctttcagattcatcaaaacatgttcagacgaactagctaaaatacactgcataccta

SEQ ID NO: 952 - DNA, 200 bp, Lawsonia intracellularis
gtaacgaacttgtttgtccatctctattatatcctggtaaaaaacatgatgaagttctattaccactacctctatggctatcagtttggtgagaaccaaaaggtctttgggatggagctaacaaaggacattcacatgatcctgaacattcgcataaattagcttccctcgtattatcacctaaggtaatataaaatggt

SEQ ID NO: 953 - DNA, 200 bp, Lawsonia intracellularis
attccgtcctctggagttggattctcatgtacacatgaagatctcttagaacaataatatatacctaatccggcacaaaaaccaacaaaacaaccacctatagtacctgtaactacagcacctactcgctcacttgaatgagggaaagtaaacatattactaaataaaacacctgcgacagtacctaacactccacctat

SEQ ID NO: 954 - DNA, 200 bp, Lawsonia intracellularis
aatacaccctactgtaagataagggcaaggatttccccgtctacacatattcctaaacattgaactagaactaatcgaaggagtagaactttcactatcagaattagtcaaaggattaaaaccattatttctagaaaaaccaggcatagcaaatgcgttaactgatgttactaataaaaaaaacggaagaattgttactg

SEQ ID NO: 955 - DNA, 200 bp, Lawsonia intracellularis
caacacttttccgtaatatattttttattatacatttattataaaactcttgttgtttaaatatatacctatagttacccattaacctttctataccttctttaagcatgttatatatatatataattttatatgtatatataaaatattcctttatcatagataagcttccttttatatgtatagatactttttatatt

SEQ ID NO: 956 - DNA, 200 bp, Lawsonia intracellularis
gtatcttattgtatatatatatattgtttttataaaaacaaatttctatatattaatatgttaatagaacttatattatttataatataaatataatttctatatattttatatgtatagaatatacataaatattgtttacacatttaatgtaaacaatattttttcattatgtgattaaaatacaaaagatatagata

SEQ ID NO: 957 - DNA, 200 bp, Lawsonia intracellularis
ctttttattatgtattatataatttgaagattaatagataattcaaaaagaaaaactaatgtgtatataaacattatgaagaaaagaaacactaattaataatattataaatgtatatagataatagttaaattaaatacatataaaatatttttttactatataattttaaaataaataatattaattaattagtaatg

SEQ ID NO: 958 - DNA, 200 bp, Lawsonia intracellularis
tatttcaatatattaaataataaacaaattttaaaaatgatgtttatatataaaaaactacattaataatttaatattaatgtagtctagtatttaataagtatttatgatctaaagttctacaataaaaaaatagaacggcctaactattacaattaggccgttttagtccacctcttcagtatcaactccatcttgat

SEQ ID NO: 959 - DNA, 200 bp, Lawsonia intracellularis
actgatacactatgtattccaaatatagtatcaatatttatattgcatttgaacatcaaatttttgtctctcaagcttttttactttatcaaaatgcattaatccatttactccaacttcaagtctttttgtaagctttgctgtataagaaagcacaacttctgttctcatatattgtctttttttttgatggaatagaa

SEQ ID NO: 960 - DNA, 200 bp, Lawsonia intracellularis
acactatactcatctattgaagccataagaggtttagcgttcaatccaaaggctacctttctcatagcagttttcactaattaaaattttatattggaaggatgggatatttagcggcagaaaatctaaaacttgctgaaagtaaagttggactatagatatggctaactggctaactatattaaaaaaatacatagcca

SEQ ID NO: 961 - DNA, 200 bp, Lawsonia intracellularis
cactagccaaccttgtccttataaagaacaaaaggttattttttagaagtaaaaaagaagtgttatttttttatttgtataggctataatacgatatttcggtgggaatacgtgtagttataatatgtagcaattaataatatgagatattctaataaggagtacttattaatataagtaacgtttatctatataataat

SEQ ID NO: 962 - DNA, 200 bp, Lawsonia intracellularis
atttaataaactatcatatagtgatttattaaaaatactacctatactgcttgaataaataccgtttgtataaccagtcaaaaatataatagtaatgatatatgtattgtcaattaacatactaagtctttagtacaaatagtagattaatagataaggataaaatctatattctgttaaaaaatacagtcagatatata

SEQ ID NO: 963 - DNA, 200 bp, Lawsonia intracellularis
acaatatataaaagttatttatatattaaaaaatatactgcaatttctaatagataaaaaatgtaagattatgtgtctatgtatagtttaataaataaaaaatagtataataaaaacctattataaaaattaataaaaataagtccattgaaggtttatattctgttctgtgtatctttttgtattcatgatatgagtta

SEQ ID NO: 964 - DNA, 200 bp, Lawsonia intracellularis
agccagatagattcatctccagcctttcagacaacttcattgaatacacaaaaccacattcaaatcttgtatagtttcttttataccctgggacagatgctttatatttatccgttagagctataattggcttactacttatactatttgtatgctgtgttcctaaaacagctgacatccatgtttgtagctgagaagtg

SEQ ID NO: 965 - DNA, 200 bp, Lawsonia intracellularis
tttgttgtcttccaatgactacgtatccctatccttttttccaccttacgttcagtattcctacttacttcacatggcagcaatcctgaaaattctttaaatgcattccaaccaacagttgaagccataagttctatatatggcgtgacggataaggtattgctttgaaaaatagtatatcctacctgtaacaatcctcc

SEQ ID NO: 966 - DNA, 200 bp, Lawsonia intracellularis
catcaaatatgcttctgggttacctttaacatgcaactcaccatccatatgggtaaacgaacgtgtattctttatacttccccatccataaaagctaactatatgaccagtaataccttttttatttggattccaaaccatcattgctgaaatagcttctaattctgttttagcttttgaagaacctatccctgagccta

SEQ ID NO: 967 - DNA, 200 bp, Lawsonia intracellularis
gccttacttcaccatatttcttcatttcattagcctgatgatagtatgataatccaatacacatgtctgaacagctatctataatgattccggcctgacctaaacgtgttttatattctaagtttgtcttatatccttctacagtaaaaaatgtacgatacaaaggaaaatgtactttttcttttttactaaatgttgga

SEQ ID NO: 968 - DNA, 200 bp, Lawsonia intracellularis
tacaacctatgcaaccgcttcctacctgtcaaaaacactaacgcattctttctattaagagagaaattatctatctcatcatcagaaaactcatatgctttcaagggtaatgtttttagtatgatagatacttggtcggaaatatctagcaggattccctgcataccaatcaatgaacttatatggccacctaaattata

SEQ ID NO: 969 - DNA, 200 bp, Lawsonia intracellularis
cccaggaataaaatctgctttaactttacatgctgattgccccatcagcttcaaagatgaatacttcacttctgatgactgctgaccaccatcagttgtactatccttagctccttctttatttccttgagtagataagactatacctctggctggtgcttcagattcatcttgtaaacctgctgttgacagatcttcaa

SEQ ID NO: 970 - DNA, 200 bp, Lawsonia intracellularis
ctgcatcaaaaaattcttcatcacaactttcatactcatcgctactgctattactatcctcatcacttgaactatctacatgagttaaatcatcttcatcatcagattgttgttgaaacatacctaatgctctttggtctgcagctgtccataaacaaaacctttgtttccatgttttctttctttcaagataccctttt

SEQ ID NO: 971 - DNA, 200 bp, Lawsonia intracellularis
aaagcattattattaagttgctgacgacaactctctaacattactatctttttttgtgtttgttcaatggatttttgtagtttttttacttctgcttttgcatcaatttcacaatgccaacaaaaaccactggctatccaagtattttttctgcaatcctcagaaaaggtacaacgttctttatagaaccttctcttata

SEQ ID NO: 972 - DNA, 200 bp, Lawsonia intracellularis
tttgtccccatgatgagctctatcctgccaaaacaaaaaagaattacgccatgctcttcctgaagagctattccaataacgttgttgctctctccagtaagtaatctgactttctaaaattaaaatttctttatggaaaaaatttatttgactccttaaccacttcatatttgccttacaacattgtctttcttcttccc

SEQ ID NO: 973 - DNA, 200 bp, Lawsonia intracellularis
agatttgtaagtctttttctacactattccttagaatactatacatattagggatagataaccagcaacattgattactactaaaactacttctaaaccttaagtctaaaccaacctgcttatgcatagctaatgatatttcaacgctatcaactaataaaatgtaaagaaagagaaaaaaaactttcattacttgttgt

SEQ ID NO: 974 - DNA, 200 bp, Lawsonia intracellularis
atacatatcgtttgttgcattaattttttcaaaaatgaatacctatataaaaactataattatatctttgtatactcaactatactataatattaaaataatatataataaaaaataagtaataattattataataactatatataattatattttatatataaaaactatatatatatatattacatacaatatattaa

SEQ ID NO: 975 - DNA, 200 bp, Lawsonia intracellularis
tattgtatatatatatatagttattaattattaactaatagtaattaataactatatataataaaataagaggataatactagtattatcctcttataacagagtgtattaattaactattaatacaactaaatatatattaatttactatgatatatactaactacataatgtagtaatctatttgtaataagtatatt

SEQ ID NO: 976 - DNA, 200 bp, Lawsonia intracellularis
tattccatttatatctatttcttttcaataagctgaatcaataatgataacgtatctgtgctcctgtatacatattataaacactattatgatataaatgtataatcatatgtgctcctatagtacatctagaggtaagctttgactcatgaatcattccaatttcagttccactatactctttcttataagaagggata

SEQ ID NO: 977 - DNA, 200 bp, Lawsonia intracellularis
gaaacactatatctaatattaggtattcctaaaagtgtagatttaaattctgcaaaatgatactgtccagatacatatgaaatccatccttgtagttgagaattttgacttactttgtactgactacgtaaaccaatacttttttcctgtgtttgttcattatttctagtaaacttcgaaggtaatatccctgtatactc

SEQ ID NO: 978 - DNA, 200 bp, Lawsonia intracellularis
ttgataacctgcacatctaatagatgaaaacatatactcaacataaggaatacatactatttctgatgaaagttgtagattataccctagttgaataagtcctgctattgattgtatctctgatgtacctttagtcttgaccatacaatcagcatggggaacagagcgtatatttgttacagtaccccaaccatagtatg

SEQ ID NO: 979 - DNA, 200 bp, Lawsonia intracellularis
ttacaatatgtcctataaaaccatttttctttgtgttccatgcaacaactgctgaaagactgtctaacttctttcttgtgctcactgagctactctttaaatctccctgcatcccatttgtcttctggactctatcgttatgacgaccataaataaatccagcagtcagtgtaggccaaagatcaaaaagaactcccatc

SEQ ID NO: 980 - DNA, 200 bp, Lawsonia intracellularis
tgccctgaggctgctttatattccatatttgaacagtaactatctaatgatgtagttattctataagggatgttattagttattccagaaaaaatatgctttgactttttagaagctaaacgccgaaaatgtgacccaaatctagtatgctcattagctgttatattagaactacatgctttcatgcctaacatttttac

SEQ ID NO: 981 - DNA, 200 bp, Lawsonia intracellularis
tgtagtggaaatacgtttagacgtatctagcaacatatgttgtattccaaataaagaacaaacttgtcccttatagttatatcctggaagcaaaaatgctgtagttttatctacaccaagcaacttatttttttctgtgttactacattgttgtgtctgtgttatagtagaatgattcttttcacttgatgatccctcac

SEQ ID NO: 982 - DNA, 200 bp, Lawsonia intracellularis
ttgatctactatctgtatgactatcgcatttgcctagcacagaattaggcgaggctaaacacaacctatcctttttatagagttccttccaataatggcctacacaacaaataacacacccaacacctgctccaacactgcagccacaagtcccgcaagcactgtataaacccacatttgaacttattccaagacaacta

SEQ ID NO: 983 - DNA, 200 bp, Lawsonia intracellularis
caaatccaatcaataccacaaccaatggctcctccagctgttgccccaacacaaactgcttttactgtatctaaacatgcatgattttcagaaaatccttttggctgagtaactaccactgtatctatactacttgtactactatttactccatcaaactctgataatatacaaggacgacggcttatcccatcatgagt

SEQ ID NO: 984 - DNA, 200 bp, Lawsonia intracellularis
ataagaaaaagaggaattatcttcctcaccagaatcgctactatatggagagtctgaaccaagatactgagaatcccctaacgataaatctgacgatggagagtctgaaccaagatactgagaatcccctaacgataaatctgaaccaagatcctgagaatctcctaacgataaatctactaatgatggagggggtgggg

SEQ ID NO: 985 - DNA, 200 bp, Lawsonia intracellularis
aaggattatggccatcatcaaaacttgattctgaactaagatcctgaaaacttcctaacaatgaacctgatgatgaagagtctgagccaagatcctgagaatctcctaacgataaatctactaatgatggagggggtggggaaggattatggccatcatcaaaacttgattctgaactaagatcctgaaaacttcctaac

SEQ ID NO: 986 - DNA, 200 bp, Lawsonia intracellularis
aatgaacctgatgatgaagagtctgaaccaagatcctgagaatctcctaacgataaatctactaatgatggagggggtggggaaggattatggccatcatcaaaacttgattctgaactaagatcctgaaaacttcctaacaatgaacctgatgatgaagagtctgagccaagatcctgagaatctcctaacgataaatc

SEQ ID NO: 987 - DNA, 200 bp, Lawsonia intracellularis
tactaatgatggagggggtggggaaggattatggccatcatcaaaacttgattctgaactaagatcctgaaaacttcctaacaatgaacctgatgatgaagagtctgagccaagatcctgagaatctcctaacgataaatctactaatgatggagggggtggggaaggattatggccatcatcaaaacttgattctgaac

SEQ ID NO: 988 - DNA, 200 bp, Lawsonia intracellularis
taagatcctgaaaacttcctaacaatgaacctgatgatgaagagtctgagccaagatcctgagaatctcctaacgataaatctactaatgatggagggggtggggaaggattatggccatcatcaaaacttgattctgaactaagatcctgaaaacttcctaacaatgaacctgatgatgaagagtctgaaccaagatcc

SEQ ID NO: 989 - DNA, 200 bp, Lawsonia intracellularis
tgagaatctcctaacgataaatctactaatgatggagggggtggggaaggattatggccatcatcaaaacttgattctgaactaagatcctgaaaacttcctaacaatgaacctgatgatgaagagtctgagccaagatcctgagaatctcctaacgataaatctactaatgatggagggggtggggaaggattatggcc

SEQ ID NO: 990 - DNA, 200 bp, Lawsonia intracellularis
atcatcaaaacttgattctgaactaagatcctgaaaacttcctaacaatgaacctgatgatgaagagtctgagccaagatcctgagaatctcctaacgataaatctactaatgatggagggggtggggagggagaattataaccccttttaatactagaaatagagaaggcttctccagctgtcaaatatacacataaaa

SEQ ID NO: 991 - DNA, 200 bp, Lawsonia intracellularis
aagaggaaaaaatgataaacactttatttctagaaaaaacttttatgctatattgaactagccaactataaaatccatacatatcccatgttaaactcttaatacaataagtttcatacatatacatatgagtatatcttctacaaaagaataaaaaaataagaataaagtatataaatatcgttaacataatataaaac

SEQ ID NO: 992 - DNA, 200 bp, Lawsonia intracellularis
taccttagtagattattgtattaataatatacaatataatagttaaataaaaaatataaaggacttaaagacaataataatagatgaatgtaatataaaatactttatagaataatataaaagataagatataaacaaacaaactatgttacattgtcaaaaatcaaaataaaatatcactaattttttataacacttta

SEQ ID NO: 993 - DNA, 200 bp, Lawsonia intracellularis
taatatataaattcctcattaagttatagatttataatatctaatagttaaacaaaatagataaataatttaaaagcaataataataataataataataatagatataagaggatgtagaataccttatagaataaggtaaaagataagatgtaaaaaactaaattatactacactatcaaaaatcaaaaataaaatacc

SEQ ID NO: 994 - DNA, 200 bp, Lawsonia intracellularis
actagtttttacaacattccctatgaaaactctcacaatatattctattaaaatgtatagcgtaattgaaaaaaaacatgttgccccccatagtttttttgtacttttttaatatatgatgttccatttacataaaaatgggcagtctctgttaaagcagtttgataggataatccaaactctgcctgtagatactgttc

SEQ ID NO: 995 - DNA, 200 bp, Lawsonia intracellularis
cttttggacaggaaaagataccgtatacatatattggttaggtataactgatagagtagaatacactccttttgtcttttgcattccagaagtacctgcaatccatatttgaagacacgttaaaggagtcggcttccaattactacataagccaatacgtttttcatgaataatcttcatatcatcagtaaatgaacatg

SEQ ID NO: 996 - DNA, 200 bp, Lawsonia intracellularis
gtaataatcctagcttttcttgatagccacctctttgtaccattgaaaccatatattcaatatatggcgtcatagatacaccatgtcgtatgtctataggatatcctatgtggataagtccacctacagaactaatacttgacgatccttttgtatgtacttcttttcctccacgtgaaaatcttcgtatattctttgcc

SEQ ID NO: 997 - DNA, 200 bp, Lawsonia intracellularis
ttaccccaaccatagcaagttgaaagacttcccataatacctactttatctaaatcaaacatcaccatcgtggagaaactatctacatctaatgtagtacctaatattcctaatgctgacgaaacgtttcctttatactctttaactttccctttttgatgaccatacacaattcctaacgatacattagaagtaatatc

SEQ ID NO: 998 - DNA, 200 bp, Lawsonia intracellularis
tactatacaacctacttgttctggagatatcttatcttcaatactatacttctgactatctatactaccattggcttgatacaattttaatgcttgaaaaacattaaaatgtcgcatgctacttccagaagtactgaaatacttcatctgctttactggctttcttgtaagacgtgcacccctattgtatgttagggcat

SEQ ID NO: 999 - DNA, 200 bp, Lawsonia intracellularis
atgcttcacctgtattaagtctctcctgatatccttttaaaactaagtcccttaatgtcatagatagttgtgtagacacatctaaaagtacatgtcgcatactggctaatgcattacgttgatcttgataattatagcctgaactaataaaaacactttctttaataggaccagatgatgaagaaaaaattttacttcca

SEQ ID NO: 1000 - DNA, 200 bp, Lawsonia intracellularis
cttgaacaacgtgaagaacttccctgttggcctaatggattaggaggggttatcacaggagtactaacaaagttaccttcctcataacatgatttctctctttgacattctccagttgaagaatcttcttctgaaaataatgaagaaattagattcccaacccattgaaatactatacatcctgatgtaagaactgtttc

SEQ ID NO: 1001 - DNA, 200 bp, Lawsonia intracellularis
aaaactagaacattgagcatgacacccttctgaaaagaaacttctcattgtcccataaaattctaaagggtgacaaaatggattaggacaactttcagaatacatctcactagatatcgtaggacaacatcctgtattttcctcttcttctgttttctcaaaatcttctgttattataaaaaactctggacttgtattag

SEQ ID NO: 1002 - DNA, 200 bp, Lawsonia intracellularis
gatgagcaactgctggattttctaacacactttgtgcatttgatacaccacattcttcattattatacatagcaaaaacatcttcaacacaaaaacatatatacaatataaaagaaaagcattgtattattttttttacattacttatagtaatccaaaataacttaaaaagcatataataccttctatcaatactctaa

SEQ ID NO: 1003 - DNA, 200 bp, Lawsonia intracellularis
acatagagaactataaaaactattctaaaagaattatgttatgattttattatttaaataagatttttataaagaaagaataaaagataaggacttcatacaataaaaaataaatatattatttattataagatcctaatataaattaaaatagcctattataattaatattaatatatagatatattgtgtaacaattg

SEQ ID NO: 1004 - DNA, 200 bp, Lawsonia intracellularis
ctacaacatgtttatataattaatataattgtgtgatactgattttaataaatagagaggttctattcacctaataaatattcataacaagatagacactatatacttcaaggttgtatttatattataaaaaatatataacgtcaaacactattataaaaaatagtaaattattataaaaaatagtaaattattataaa

SEQ ID NO: 1005 - DNA, 200 bp, Lawsonia intracellularis
aaatagtaaattttttcttaatctattgttctaaatgaatattttatataatacctatactatatcttaataatataaagcaactatctatcttttatataaaattaataaaagatagatagttgctacaatatatacatatataactatttgtagctataaaatagtatgtattaattatcttattgtatatattttct

SEQ ID NO: 1006 - DNA, 200 bp, Lawsonia intracellularis
tattacttcaatacgtatattgtacttgagcgactatattctgattatcaactttactccatttattaagacgaaaaagcccactcagactaacgcttacattatctgaaaatgtaccatcataagagactcccagctctgttctaatatactggtacttcttagcataggtagaaaggttatgtctgtaataagaagac

SEQ ID NO: 1007 - DNA, 200 bp, Lawsonia intracellularis
aagtatgaagaagatatcaaactatttgttttactatatccagatatacctgcaacccaaagttgcattgaagaattcattgatacccctatgtcactccgtaggcctatacttttttctaatatctgctctttatttttcccaaacttacaagcacctggagaatactgctctttatatgaactccaactgacactaga

SEQ ID NO: 1008 - DNA, 200 bp, Lawsonia intracellularis
aaacatacattcaacataaggaaccaatgtcacttgattcaataaaaaaaaattatatcctagttgtactaatccacccagaagattaaccttaggagagcctttagtaataatctcttgccccttatgaataatctttcgagtattctttactttcccccaattataagaacttactaaatgacctgttacccctgcat

SEQ ID NO: 1009 - DNA, 200 bp, Lawsonia intracellularis
ttgctgggttcaaagcaacaatagcagaaaggccttctgtttccattttagacttcactgaacctattgttgaacctagttgtatccctttatattcttttgattcttttttattggagtcataagcaaaaccacaagttaaacctggagagaagtctaaaagaacacctatctggccagagcatacttttcttttatgt

SEQ ID NO: 1010 - DNA, 200 bp, Lawsonia intracellularis
atatcctgaggttttatagatgaaaaaaaacgatagggtaaaaaggatggcacatctattgttgtagatagtgaacctctttttcttttgacagatactactttccccttgtctttattgatataattctttttaaaaaaagagaagtcctgggatttagagctatcagaataattttttaaaagcaacatccgtaatgt

SEQ ID NO: 1011 - DNA, 200 bp, Lawsonia intracellularis
agtcaatacttgttcagaaccattactcaataaacactgcatgctatgtaatgagctcatttgtcctaataatgatgcttctgcagttagatagcttgagcttcgacctctacctcctggttgactaacaactggactacctggacttgctggttgatgaacagttacaggagggaaacttacagaaggaccttcatctg

SEQ ID NO: 1012 - DNA, 200 bp, Lawsonia intracellularis
gggactctggctctctatgttgatgagttccagtagaaccatacattgttgtacttccctctcctccagtccttatagagttactagtactatgatcctcccaccccatccatctgttataaccacacaaataacatgctaatgaaactccagcaccaacacatgcaccacctacagaacttaagacccacccagctggt

SEQ ID NO: 1013 - DNA, 200 bp, Lawsonia intracellularis
ccacataatgaactcatacttgggttcataactgccagcatagaataccctattgcaccactaccacaaccacatgcagttcctgcctctgctgcacttacttcaggatatgtagattgtggttgtgaatatgatgggtaagaataatagccattagctccagaggaagaagaacttgttgaggaagaacttgttgttga

SEQ ID NO: 1014 - DNA, 200 bp, Lawsonia intracellularis
cgttgaacttaataaaggttgacgctcttcttcacttccattcatagaaaaagattcattactataaaaaagaatacaaaaacatactaatgtcgctacaataagaaaccttttaactgtgcttaacagctgtataggaaagtataaaaataaacgtttgccatactgatagttacttttaaaataaaaatatagtttgc

SEQ ID NO: 1015 - DNA, 200 bp, Lawsonia intracellularis
taataactactgtataaatatatattattttatatatattccacatagttagtgagtagtttttcattttttatccttttattaactacttattctatagtatgaatattaaacatttatatagtagaagataattatacttaataatattacctactcccttactatatatatatataactaaaatatattttatattt

SEQ ID NO: 1016 - DNA, 200 bp, Lawsonia intracellularis
tatatattctttaatcaatattttttcacaaaagaaaaataaagtattattttatataattaaaaaaaatgcaatacaaattttgtactgcattttttataattataaaatttaattgtataaagtttatttatattttattaaatatataatacaaatatagtatatacatataataaaattatatacttatataaagt

SEQ ID NO: 1017 - DNA, 200 bp, Lawsonia intracellularis
atttttttctacatttaaaatatgtatatttagatttgatataaaaattaatataaatttatacaaataattataattaagatattattgtatacttatgatagaaaaatattaatattttattatttataaatataatctatactttaatataaacatattaatattcatatattagaattatatatcaaaatatacat

SEQ ID NO: 1018 - DNA, 200 bp, Lawsonia intracellularis
attaaatatatattaattataatatattaatatatatatataatatttttatagactttttaatatttaataactttttaattaatgtattattaaatactatagttatataatacaaatatttttttcatattagaacataattgtgtgctatacatatagtataataaatatgaatttattatatattactctatttg

SEQ ID NO: 1019 - DNA, 200 bp, Lawsonia intracellularis
tataaactgctatcccatctactggtgtgtgtatgtataaatttatttttctgtaccaacttattactattgtaaaatagaatattgtaattcatcatgtatatcatataaaagtgttttttgcctttgtttactctctacttgatgaatcaaatattccaaatcaacattgcataaccttaaatagttttgtcttcgaa

SEQ ID NO: 1020 - DNA, 200 bp, Lawsonia intracellularis
tatgaagatattctccttcgtgttgtctatgttctttttgcacgttatctacttctaccattggctgctctattcttatgttgttctcttgatattctttatttttatcttccatctctttactctcttcttctcttctatttatttcctcccttatttgctccttttctatccttcttttttgacgctcttcatcttca

SEQ ID NO: 1021 - DNA, 200 bp, Lawsonia intracellularis
tttttttcttcaggaaaacctggtaattcaatagtaagagggttaccaacagttacggtttccaaacacttttttatagtcgttatatcctgtttaaaaattaaaagttgtgcctgtctttcttgtagtgaacacaagctagtagcaatattcgttgaaaaagatgggttatggatatatgataaatatgctaaagggat

SEQ ID NO: 1022 - DNA, 200 bp, Lawsonia intracellularis
agtagtcaaaacggacctcgttataaaaatagtattagactgaagtaaaattgtgtgtgtgtgtgtgtgtgtgtgtgtgtgtgtgtgtggtctcagggctatgactgtagaattatactatctaacgtcgttatctataattataaatacaaaaataatagtctatcattaataatctggcattaacctaagaatagtaa

SEQ ID NO: 1023 - DNA, 200 bp, Lawsonia intracellularis
ccctttaaaaaacatatttttttagatagggataaatacatttagactagtatgtagtaaatattaaagatacctattagctatattgatgtatgttgttatcgttaaacaacacaagtaaggaaggatataaataacctaacaactctagataaaacatatagcaaaagaatatctaatttattagaattgttctttaa

SEQ ID NO: 1024 - DNA, 200 bp, Lawsonia intracellularis
aatgataatagtcacaaaaaaatagaagtcaaattttatcttaacatgtagttcttacaataaaaaatatcaattttacagatataaacactactttttatcatttatataataactattagtattcacataatatatatataatttgtcataactaaatacaacattatactctaaacaaaaacatatccattgttttt

SEQ ID NO: 1025 - DNA, 200 bp, Lawsonia intracellularis
tagaagctacaatagctaaatctattatcacctattttgaaagaacatccccatatctattagctataactaaaaataaatgtttttcacctcacaagttatttgataatgcgcccttttagctattcatatttgtataaaaacctttcactctctagtgacaatattgtccaaaaacttctttaattacattcttttta

SEQ ID NO: 1026 - DNA, 200 bp, Lawsonia intracellularis
tcactaaccgtatagtgtatgtaatagttaatacatatttacctattaataatacatagatataacatatacgttcataatagaactatctattacagttaatgataactaatgacaatcaataactatttttatctgtaaaaaagatgacatttatcagtcgtcaaaataaccactcttcaaatataatcatttgattt

SEQ ID NO: 1027 - DNA, 200 bp, Lawsonia intracellularis
atttaattaaatttaaaaaaactaaaatacactaataaataatgacacctaataatacctgatgcaccaatagatataactaaggatacttccataagtgttgttttaataaaaaacagaacaaactatttcctttagtcattaggaaatagaaggattaaatactgacattgttcgtcaaaataaccactaagacataa

SEQ ID NO: 1028 - DNA, 200 bp, Lawsonia intracellularis
taacttattaaaataatttattttattgaattttgatatgcaaaaatgtatatctattctttctctttatgaataaaaaagtttgctctatttttaaagttaatgatacgttaataaagataatgtattacttagtcatctattgacagttagttattataactagttgtttttaagagcaataaggtgtcattaacaga

SEQ ID NO: 1029 - DNA, 200 bp, Lawsonia intracellularis
taattacagacgaattttaccatctgattcataatatatgaaaaatattactataacacttagtatatatactgacatccttcggcaaaatgtccacctttttacatatcaaaaaatcgtcatagacgattaatatctaactagttttatcaataattttttattaaaaaaaattaatacaactagatatagctaatgat

SEQ ID NO: 1030 - DNA, 200 bp, Lawsonia intracellularis
agtatgctattattactaactgtcattaattgtaaccagactagtattaacagtaatgagccatcataattacttgtgttgtgatgatattctcttcttagaaggtaatgcttctgctgttctatttaataatacaaggtttgtacgtgaaagaagacttgtagattcaagaacctttttttcaacaagctctgcaatag

SEQ ID NO: 1031 - DNA, 200 bp, Lawsonia intracellularis
cctctcgaatctgtcgacgtgtctcttttaaaggaacatgaggatccatattcaacgctaaagctaatgtcataatattaccacgaaagacaggattatctctatgagactgacaaaaacgatacattgccttagcaatactacccctaatttggaaacgctttgtaatattgatccatgtaagactattcgccaaatac

SEQ ID NO: 1032 - DNA, 200 bp, Lawsonia intracellularis
atttgatagaaaaaaggatttacagtgacagaaatttctctatcttttggtcgaagacgtaagttagaaataatttgagaaagatcatattggaggtcttcacctttttcacgtacaaaaagctgcatcgatcctaaggctaaactctttaagctggtaataagcttctcataatgatttgctcctggccgcttatgacc

SEQ ID NO: 1033 - DNA, 200 bp, Lawsonia intracellularis
cataagacgtaaaataggaagaacaggacctctatatgtaaatgaaagaggaagtgtattcttactattaccaatcaatgttgctgtttgttctggcgaaagtttagctggtgggagatcatccacaagctgctccatatcatcatcattttgtctttgagttttacgagttggtgtccgatctaactttcccatctcaa

SEQ ID NO: 1034 - DNA, 200 bp, Lawsonia intracellularis
taatagctaatagagccataagagcatcctcttcttctatactcaactttggccctgtatatatgatttcaccccatggacctgaagaaacaagctcattaatgagatagcaagatgactctacaatttttgacttatcctgaatagatgcctttaaattctttacaataatatctcttcgtcctttttctttattattc

SEQ ID NO: 1035 - DNA, 200 bp, Lawsonia intracellularis
atagggaaaaaaggagaaacacgagaaatacttgtaggatatccacaccaaactaagagatttccttgttcagggggtgtttttttaacaatagtcgcaacagctttggtggtttctctcccctgagcttctgctactgataacatagattgaggtgcttcaactggtgttctacctatatctgctaatgtaggacatcc

SEQ ID NO: 1036 - DNA, 200 bp, Lawsonia intracellularis
tgaagccttccagttacgaataacagcttcaagtagtggagggagctctgtatggtgctcctgacaagattcatattgaacagccaaaatagtattatatgatcgtaatgcttcaagctctacttgggaaagatgtagtgaagatgcgctaatctgttgactatttttagtactcttcttttgtaatgctagaggagatt

SEQ ID NO: 1037 - DNA, 200 bp, Lawsonia intracellularis
cctctttttttgccatctctaacctcacctttcattactaaaaacatgttctacattcatcaaggaacataactatctcgtcaaagaaaaaatgctctaaaaagaactcatttactattatctccgatctaatccttactctattagctatattcaactatctacactagataagtagcaacgatttttatatatagcta

SEQ ID NO: 1038 - DNA, 200 bp, Lawsonia intracellularis
caactaattctggcctgttagatatcttttcaaaaaaagtttacataaagaaagatatatctttctactatatagaaaatactttcttctattccccctctatcttaacattatatattatatatattcctttttattctaaggatacttctatacttaatagatatcttaaaaaaaaaaaatatctatacccagacaat

SEQ ID NO: 1039 - DNA, 200 bp, Lawsonia intracellularis
atatagcttattacgttctcatattcaagctatctaacaacattttcttctggtaattcttgactttttttatctatcatgtgagaaatacatttatactgttcagctacggagacattaatgctcgctaaagttattgcctttgcaaatcataagggtggtgttggtaaaacagcaagtgctgtaaatgttgcttactg

SEQ ID NO: 1040 - DNA, 200 bp, Lawsonia intracellularis
tcttacaaaacgtaaacgtcgtgtccttgttgtagactgtgatcctcagggaaatgcatcacttacactaggaacaatctcaccctatgaacaaccacgaactgtggctaacctttttacaggtctttctttctctacagctgcagtaagctcaaaatatgaaaatttagatattatccctgcaaatcttaacgtatatg

SEQ ID NO: 1041 - DNA, 200 bp, Lawsonia intracellularis
caacagtaggaacgctatctaattctatcaaacgattttttggctttcgacaagcattggatgaagcagcacttaaagaatacgactatattatccttgactgcccaccaactattgaggggacacttctcacaaatgcacttgttatcaccgactatgtgatcattcctgtaggtgtcgaagacacatatgcattatct

SEQ ID NO: 1042 - DNA, 200 bp, Lawsonia intracellularis
ggtgtaagccatcttattaaagtagctgagacacttcgtgcagatacagaatcaaatcttgcaattatgggtgtcttactaacaatgtttgatggacgaaataatgctgcaaaaactatcagaagtgttgcaattggaacatttggcgaagatatggtttttcaaacaacaattccccgaaatacaacactaaacaaagc

SEQ ID NO: 1043 - DNA, 200 bp, Lawsonia intracellularis
tgtcatgagtaatcgagcagtatgtgactatgatgacagttgctcatcatgcagaagctacagagaattgacacaagaaattgaagttcgactaaaaaatccacatgccctcattacagacacacatccattagaatcagagtaggataatacaccatggcaaaaaatcaactggatgactttgcagcaacacttaccgc

SEQ ID NO: 1044 - DNA, 200 bp, Lawsonia intracellularis
acaattaaaagatgctgctgaacaaatgcgtaatatgaggactcctccagagcatccacaaaatgaacaaatagactctacaacaactaaaaaaaatcgctctattcctaaaaaacataaaaataccatacaactagtaacagatacgaaacaattgacaaaaaaagtatctaacaaaaaagaacaaacgcaacagactt

SEQ ID NO: 1045 - DNA, 200 bp, Lawsonia intracellularis
cccaaaagcagcctgcaaaaccaaaagatggccaaatagctcctactcaaaaagagccatctatcaatgtatccatatcaatttctccggaagaacaatcaaccaacagtatagatcaaactgtactatacagccatcaactgtcatcaattgacactactgattctagtcagctgctacagtctaaaaacaatcaacaa

SEQ ID NO: 1046 - DNA, 200 bp, Lawsonia intracellularis
aaatatagtaataatctattagcagatccagaaagtgttgatataccctctactaaactatcaacaacagtcatcgatcagtcatcagacagtcatcaacaaacattagtagacaacaataatttaatggcagctaatgacagcccattatctgtactcccatctgaatccctacaatatacccagccttcaaagagcat

SEQ ID NO: 1047 - DNA, 200 bp, Lawsonia intracellularis
gctttttgaaacggatatattacaagaaaatatatctcatcaagatattccttcacctgaagacaaccatatcaatacttcttttataggtacacctactacatctactcagccattaatagataatgatagtttaaaacagacaatgacagcttgtgacacaaaaaaacaatcacaatctatcccttggggtcattttt

SEQ ID NO: 1048 - DNA, 200 bp, Lawsonia intracellularis
cttctgatgcactcagtactgttcaaattaataccgcaactattggtggagcaagacaaattgtattagatgcccttacacaactaaagcaagaattttctcatgtaacaataaaccttaaacgtcttgccactgttcttggactctcttatgggacagtgcgaaataccattagcagacttgtaagagaaggagttatt

SEQ ID NO: 1049 - DNA, 200 bp, Lawsonia intracellularis
tatacaactcaaatccgtactggtgatgcacatggtgtatatatagaatttgctgatgggtcttctttattaccgtcagtgacagtcactcaaccaacctatgcacaacatataccttctcatcaaccttctacttctcaacagacatcaacaatacacacaaatcctatttgggatgttgattctgatatgcttagtat

SEQ ID NO: 1050 - DNA, 200 bp, Lawsonia intracellularis
gctctggccatatgcttttgcagcaggattaaaacgcatccacttagaacatcttaggaaagcatttcaaattcaacagtttgatgatgcacatgttgcatgttaccttcgttatcttaactggaagatagaaaaagaagctcaagatgaaaatcaagcaacagccatccttcagcaatggatacaaaccatgcagcaac

SEQ ID NO: 1051 - DNA, 200 bp, Lawsonia intracellularis
agggcaaatatccacgtccaacagattacgatgaaccagaaggcttagaatagtccatttttactatatttttacttattatctctattatttttatttttttaataaagatatttttgaggtattatttattagtaatagataacatgatgtcttttctttttctttttttgttttccttaagatccttagagtagttt

SEQ ID NO: 1052 - DNA, 200 bp, Lawsonia intracellularis
gtgagtcctacatatataaaggttttatatctatctaagtggatattttaccgttattaagtgggcattttaacgaaaaatagtgattgttttgtcgttaatgagtgattattttaccgaaaggtggacattttgccgaatagcttataagttaaaacatatcatctactttttattatagataatatgttgagagaatt

SEQ ID NO: 1053 - DNA, 200 bp, Lawsonia intracellularis
attattgtaatatcccttgtttttttacataagtttttctaagttagatagtttttctacgaaatagatatatagtccataaacatataccagggcaagtaagccctggtatatgttgtgataacaaatagatatatcctaattgtatatgttacatactagtatgtatattggatatatgtatttatttgctgtccttc

SEQ ID NO: 1054 - DNA, 200 bp, Lawsonia intracellularis
aaaacgttttgttttttcaagacgtacggatgtgtttataccaatattaatagtatctataatgtttgcttcataagaaagacccaactctgttcttacataacgttttttatatgtaggaatggatgccttatacctatcaatttgtgcaattaatggttttgaatggataccttctaaagtacgtttcccagagatag

SEQ ID NO: 1055 - DNA, 200 bp, Lawsonia intracellularis
cggaaacccatgattgaagttgactgtttgttgttactttccattgattacgaagaccaatactttgttccataacatattctttattttgactgattttgcaaggaagcggaccagttttttcgctataagaactccatgatactgttgagatcatgtactctatgtatggtgtaaaggagaagcgttttgtaatagga

SEQ ID NO: 1056 - DNA, 200 bp, Lawsonia intracellularis
aggttatagcctaattggaaaaggcctccacctaaactgatatctggttttcctttagccccgacctctgagtctccgtgtgtaaagtaacgatttgtttttactttaccccatccataacaacttgcaagatgtcctgtgaagccaaatttgtctgtattccaactaataacagctgaaagactatctgttgttgtttg

SEQ ID NO: 1057 - DNA, 200 bp, Lawsonia intracellularis
tgcttttacagaaccacttgctgttccaaagcgcatacctatatgttcttttgctacttctttattacgattataagccaatccgagtcgtacatttggcataaggtttgttataataccaattcgacctccacgacatttgcgttctaagtttgctgtatagttatctataaaaccaaacatagcatatgatttgaatg

SEQ ID NO: 1058 - DNA, 200 bp, Lawsonia intracellularis
ctgatgtaagtgtattttgtgtgtttttctgatgaggacctgaaagtatatgacgttttgatgtgaaccttgtcataagttgaaggctatcatcttcatatgaggtatttgtatatgcttttagtgcaagtagccgtaatgaatatagaacttgttctgaagagcctaacaatatactttgcatactttgaagagagctt

SEQ ID NO: 1059 - DNA, 200 bp, Lawsonia intracellularis
atttgtccagcacgattatatcctggtataaatgtgtcataacatttgtacccatgtcttccacccatgccacctaaaggtcctcttgttagagctgttggctgctgttgttgctctccatttttttgtcctttgcctttccccttacctttgccttttcctttactttttttactttgttcatcatctgagggaccatc

SEQ ID NO: 1060 - DNA, 200 bp, Lawsonia intracellularis
attactacctccatcatgttgagatgaactaccactattctgttgtctcttgtcatcattatcatcatcactatcagtatcactattattctgttgatttgctgataatagtggataatcttctggaccaaatcctaagccatggcctcctgatgatggtccaggtctttcgtcatcattatcattttcctctcttggct

SEQ ID NO: 1061 - DNA, 200 bp, Lawsonia intracellularis
gtggttgggaggttacaggcgctgccacacatgttacaagagaatgcatagcttgttgtatttttgcccattttttaggatggtgtttttttaaacagtgtgtaagaagagcacaagctgcacctgtggcacagccagtagcaccacttgttatagcggttactgctgctgatgagccacaaccatgtgccatagcacta

SEQ ID NO: 1062 - DNA, 200 bp, Lawsonia intracellularis
ctagctcctcctatacaacaattacataaaccactacttgtggcaccacaacatacttctttaatgcattgtttatcttctgttgaaaattctgatgaaacttgtggttgtcgttgtggttgttctgtgattggttgtccctctttttttgattttatgccatgtttttttaaacagcagtccaaaaagccatctctttc

SEQ ID NO: 1063 - DNA, 200 bp, Lawsonia intracellularis
taattcgccaaggaaccaccataaaaatccacaaagactaccagtacaacaacctgaacctgcacctgcagcagcactttctatcattttactaaggtcccagtgagacataatgcctcctgcacaagtgcctgcaatacaaccagcccctgtaccaacagcagctcctaatgccattttttcacatatacttttacagc

SEQ ID NO: 1064 - DNA, 200 bp, Lawsonia intracellularis
atgtcttacattcttctgtatcatttatttcccttgttgtatgtccatcttcccttaagtgttgattcccatattttttacaataataacccatacctaagagaccacatgtacataaactccctgaggaaacaaagctagcagttgttgaaacatcagcaccaaggagataagcgcccagtgagccaaagagtgtacca

SEQ ID NO: 1065 - DNA, 200 bp, Lawsonia intracellularis
agacatgatccaaaagttgcccaccctgcaaaatgatcacatggatctggatacgtgcaaaccctaacagtatagtctgtcatagtacaacatggggaaggacaagttcctctatcaatatcttcatttgtcatatgtggatcagtagcttgtccagaaaatgattgaggttgtgttgtgattgggaggtgtgatgtact

SEQ ID NO: 1066 - DNA, 200 bp, Lawsonia intracellularis
tgaggtcaaatggtgttgagctaatcgacttgactgatgttcgctaatattgcttgttattctgcttgatgattggcaacacattgctgaagtagcatataaacatgaacttaatggaccacctattgcagccccaattccagctccaattccacatgctgcagccatgtctgggcagggagcacctgttgctgcactag

SEQ ID NO: 1067 - DNA, 200 bp, Lawsonia intracellularis
tgacaagaccaactccagcgccaaggagtccaccagctgaaatccctaaacctgtaactttaaccatgtctttatcacatgtaacatagggagaatcttgttgacatccatgtgttttacaaagtgaacatgctgttcctaatgctgcgccagcaacagaaccaccaagacaagttccagctcccacagaccctgtcgca

SEQ ID NO: 1068 - DNA, 200 bp, Lawsonia intracellularis
ggacaagcacagcttgtcattgcaccaaatggaatcatccctgctccaataccaagaccagcaccaatacatgctcctttcaggcaggcgtcaagactatttttatcacagggaggacaacattcttgaggactagaaagtcctcttgtaacttctacggaactactcccagaacttactgatggactagatgaaccaaa

SEQ ID NO: 1069 - DNA, 200 bp, Lawsonia intracellularis
gcctgaagattgtggctgacttgtaattggtgaagagccaccagagcttcctcctgagtgatgagtaccaccatcaggaccaagtttaaggcataggggtttaggtgatttaccattaccattgttcatagctaggagttcactgcttccacaaaataagcaaaaaaaaggtaatagtaatatagctattgtttgttgta

SEQ ID NO: 1070 - DNA, 200 bp, Lawsonia intracellularis
aaagtgttttggttagctttatatgttttggtattctaaaaattttatgtatttttttatcatatactgtatgtaatattgtattaaatgtttgggccttatatatacatatgtttcttatcagctgttgaaaggtatctgataagttcataatatattgtgatataaggtttttcatatttggttcccttagtataatg

SEQ ID NO: 1071 - DNA, 200 bp, Lawsonia intracellularis
gttaatattagtgtgtagttgtgattttattttttgatatattactaagcatattatattacttttatttaaaacgtgttactattaggtaataatatgttacgtagtgtagggtatcctcttttgttttttgtttatgaatgctctatgagatagataaaaaagaagaagtcataagtcggattatgactattggtagt

SEQ ID NO: 1072 - DNA, 200 bp, Lawsonia intracellularis
attcctcttttttaagaaaaaatgagtatagcaaatgtttttatcaaacatttcacttcataactccaaccataatatatggaagtttctatctacataataaataaaggcgcagtacaatcagcgtgttaattatctatatttaaaggataatttattcaagtagttgtaggaggttttttagcttccctatgaaggct

SEQ ID NO: 1073 - DNA, 200 bp, Lawsonia intracellularis
ataaacataacttgttgtaaataatgtattttataaatagaatatataaaatttattatatcaatatatacagtagaattatggtatcctaaaaattaaagaagattggtatatggtatttgaatatttcacatagctataatgatgtaatacgatatattgtagatataatagatatgttatagtcctttaaggatagt

SEQ ID NO: 1074 - DNA, 200 bp, Lawsonia intracellularis
atcttatttattactattatcttttttatgtagaaaatattttttaaatacttctataacaaaatacacaacatttttactaatatacctctattatagtagattcatattacgtatctatatagtagatacactaaaaaatatagattaacttatccattagccactctttatctttatagtttttttatatcagctga

SEQ ID NO: 1075 - DNA, 200 bp, Lawsonia intracellularis
cattcttcaatcttttttaaaacagtaatcgttttatggtgtcaaacatgaactagttacaaaagatgtaacacataacactatattcaaatatccaaggctcattaaatatagacaagatatctaactagcagacaattattgaaagaaattatcttgttaattttagtattggggggtgtatgaacaggacattagtt

SEQ ID NO: 1076 - DNA, 200 bp, Lawsonia intracellularis
tctctaatggctgaagttccagtggattccatagaagacgagcagggtttaatacatgtgtttcctttgggaagctttacagctcgtgatggacctcctgggacattaggcgtgccagcaacgtcatggcagcttactttgtctggagcacaggaggttatacgacgttgggagacacgtaagacacctcttgtgattga

SEQ ID NO: 1077 - DNA, 200 bp, Lawsonia intracellularis
ttatgaacaccaaacatatgaaacaaaaggaaacggtcaaccagcacctgctgctggttggataacacgtttacttcttcgtgagaatggaatgtttgcaggtgtagaatggacctcaagggctaaagaatacatacgagcaggggaatataaatatatttctcccacatttctttttgatgcaacaacaggagaagtat

SEQ ID NO: 1078 - DNA, 200 bp, Lawsonia intracellularis
tagagctttgtagtgcagcactgacaaatatgcctgctttagatggaatggaacctgtaaaagctaaaacacatactacaatacaacttcctaagaagaaatattcacatactgggtctaaccctctacaggaaaaaggtggagctcttcacttagcaatggaattttgtgaaaagggagaaaccgatctgtttaaagag

SEQ ID NO: 1079 - DNA, 200 bp, Lawsonia intracellularis
aatgtttcttctttagaagcttctgcaacagcatttcttgaagagataaaaaaaacccagggacaacaaaaacgttctaaaaagaatagaagtgtttctaccaaatctaatatacagcaagaggcttcaagtgatcgtttctcagagcttatgggactataccatgaagcacaaaaagaagttgtatcattaaaagaacg

SEQ ID NO: 1080 - DNA, 200 bp, Lawsonia intracellularis
tatcaaagaatacgaatgtaaggaagaatcactaaagctagaacaatgtatagagaaagcattgtctgatggtagactacagcatagttgtgaagcttgggctcgtgcgtgtgcggtgagttatcctgaagtgttacgtgcttttcttgaagcatctacttctatggctgcgcttgtgtctatgcagacacgtcaggggt

SEQ ID NO: 1081 - DNA, 200 bp, Lawsonia intracellularis
ctcatataagtcaaagtgggtatggacaatctgctttgttatccacagaggaggagcatgttcggtcacaactgggcatgagtgtggaaacgtttattaaacataagaaggagtgccaataatggctattgtaacaaatacaatgttggaagcgcttcgcgtaggctttcgtgcagattttgaagaaggtaaagctaagg

SEQ ID NO: 1082 - DNA, 200 bp, Lawsonia intracellularis
cacagcctcagtagcaattggcagcaacacatgttcctagctctagtgcttccaatacatatggctggcttggacagttccctaaacttaaagagtggatagggaatagggtctttcaagatattgctgaacatgaatacacagttgcaaataagctttatgaagccacagtaagtatccctcttacagctattgaagat

SEQ ID NO: 1083 - DNA, 200 bp, Lawsonia intracellularis
gatgaacttggtgtatataaaccactctatttagaaatgggatatgcagcagctgttcatcctgatgagcttgtatttaaacttcttgctgaaggacatacaacaaaatgttctgatggtcataatttttttgatacagcacatgtcatctatgaaaatgaagatggttctggtgctgaaacaactgtttctaatagttt

SEQ ID NO: 1084 - DNA, 200 bp, Lawsonia intracellularis
atcacctacagttagtggagttaaaaatgttgttgttgttgttgaccctgttgctccttggtttttgttggacgtgtctcgtccattgcgtcctttgttatttcaagagcgtagtctcccagaactccaagtaattacaaatcctgaaaatgaacatgtttttacaaccgatagcattccttttggtgttcgctatcgtt

SEQ ID NO: 1085 - DNA, 200 bp, Lawsonia intracellularis
gtaatgctggatacggtttttggcaaatggctgttcgttcaacagaacctttgaatgcagaatcctttgagcgggcattaatgactatccgtagttttacagctgatggaggacgtcctcttggtcttggtcgtggagggaaagaaggtcttgtattggttgttccatctgttcatttatcaagtgcacgtaaggttatt

SEQ ID NO: 1086 - DNA, 200 bp, Lawsonia intracellularis
gtagctgaaagattagataatggctcttcaaatatctggtatgactctgcaacaatcattgattgtccttggttgggataactatgtacgtccaatataaagatcttcagacacagtttggcgaagcagaaatgcttgccttatgtggtgatgaagatgggaatatagatatgcctcgtctcacagaggttatcaatcaa

SEQ ID NO: 1087 - DNA, 200 bp, Lawsonia intracellularis
gcaagttcagaagcagattcatatctgggtaaacgttatattgtgccagttgagccagtaccacctgttcttcgatttatagtaggagatatggtccgttatcggttgaccagtgcagaagctttggagacgtcgttgattgttcaacgatatcagcaagccatagcatggcttataaaggtttctcaaggggagattgt

SEQ ID NO: 1088 - DNA, 200 bp, Lawsonia intracellularis
actgcctttacctacagtgaatagtgaagagcaaatggtcgtcattgacgctggtacaaggctttggaaggtcacaggagcacggtataagaaagctcaagagacaccattaccagcaagattgactatatgagcatagcatatatggagtctatatgttgtcacagatagaagatgcaatgattacttgtatcaccaag

SEQ ID NO: 1089 - DNA, 200 bp, Lawsonia intracellularis
gcacagttaccatatttgcgatttgtgggttcatatggtggcgagtttgatggagaagttcctcatgttgtgcgctcacttccaggtatatggctagctttcaaaggagagagtgcaccagttgctgtagatgtaacgcatgagcgatacaaagtagaagcacggttattgttgcttgtagcagctcgaggcatccgtaa

SEQ ID NO: 1090 - DNA, 200 bp, Lawsonia intracellularis
tgaggcagatagccgtcatagtacaaagatccatgtaggaacatatcaaatgttggcagatatgcggtcaatctttgcatttagagatcttgggattaattcagtagaatgtttagtcccaggagaaacaacaagtctctttaatgggaagacaaaacaacagggcctatctgtttttgctcaagagtggattgtaccat

SEQ ID NO: 1091 - DNA, 200 bp, Lawsonia intracellularis
atggtttttacgttcgtgaacctgggaagcgccaattagatgaaccatattcaggctatcttatgccagaagggacaatgataggcaatactcaggttccatacttgcctcccctgcaaagattgaaactttgctattatataggtggagaagaggaagcatgtgatcaggctcttcttgaaaaaggacgtactttataa

SEQ ID NO: 1092 - DNA, 200 bp, Lawsonia intracellularis
acaacaccgcttgattaagcggtagatataactatcgggacagtttttaggttttgagcccgaaaaaaggaaaagctatggcaagtccaaatattcaatttgacgctattcctgtcaacatacgtaaaccaggaaagtattttgagtttaatacacgactggctgtacggaccctcccaggtaatcctcagtctttactt

SEQ ID NO: 1093 - DNA, 200 bp, Lawsonia intracellularis
attattgcacagcaaaccggaacagagccatgcgagccaagacggatttttgatgcagatactgcagggttattatttggttttggttcacaaatccattcaatggttttggctgccatgcatgcaaatccatatcttgatcttaccgtgttgccattagcagatcctgaaagtggtttagctgcaacagcagtagtaac

SEQ ID NO: 1094 - DNA, 200 bp, Lawsonia intracellularis
acctagtggagaagcacaaagtgctggcgttgtaagtattactattgctggaaagacagtttctatggctcttgctaaagatgatacaccttcagactgcgctgtgacacttgcccaagctgtaaatcttgttgaagaactccctgtagttgcttctgtaacagagtcaggggtattaacacttacggctaagaataaag

SEQ ID NO: 1095 - DNA, 200 bp, Lawsonia intracellularis
ggacatgtggcaatggtattacagtgtctgtgcagtcttctgtccctgggatgaaatgcacattgacacctatgagtggtggacaaggtgaacctgattttcaagcagcattagctaaagtcttttcaggagattatacaatttattgtgttgggacaacacaatcagaacatcttaaagcattgagcgatcatttagca

SEQ ID NO: 1096 - DNA, 200 bp, Lawsonia intracellularis
tctatgggtgctcctttagaacaacgaggggctataggtgtgtacgcttttgcagggacactagaggatgctattacattagctgaatctacgaatagcggacgtctcacaggtgctgtattaccagggaccccatcgttatcatatgaggtggcagcttcttatgctgcaacaattgcttcagaagaagatccagctcg

SEQ ID NO: 1097 - DNA, 200 bp, Lawsonia intracellularis
tccgttaaatggattaacccttaaaggtattattccatccccaataagtcagcgtctttcacgcacacagcaagaagtagctttgaaaagtggtgttacacctcttgaagtaggtactggtgaagttgtttctattgtccgagctattagtacatataccaagaatagtgaaggttctcctgatagtgcactacttgata

SEQ ID NO: 1098 - DNA, 200 bp, Lawsonia intracellularis
ttacaaccattcggacattggattatttacgtaaagctatacgtgaacgtatgagtctaagattcccaagagaaaaactttctacacggacattaccaaaagttcgtagtgaagttttggatgtcttgcggaagatggaagagttagaaattcttgaagaagtagccagtaatgcagagggtgttattgttgaaagggat

SEQ ID NO: 1099 - DNA, 200 bp, Lawsonia intracellularis
attgaagatccaaatcgtttaaatgcccgtattcctgctgatgtagtcaatggtttacacatttttgcaggcagaattgatttaatactataataagctgtcattaactatcattagcagttaactgactatagaataatgcgaaaatatagcccattttataacatgatgtaagaaaaagacagtataattggatagta

SEQ ID NO: 1100 - DNA, 200 bp, Lawsonia intracellularis
agggtgtgttgttgacttctagtgatagtagttctgaatggtactaaattttttttagtaccattcaaaaaaatgaaaagaacttaagtaagataaagagatatttgttcataacgatgctttcagggaaatggatcagtctaaaggagtgaaaaatggcattacagcaatatgtgggagcaattatacttgaagtggat

SEQ ID NO: 1101 - DNA, 200 bp, Lawsonia intracellularis
ggccaagaggttgaatgtaccgctttttctccaacaattacaacaggtcgtattcctgtacgtacaatgaatagaaatggtaagattgctggttatgcttctggcgtcatggaatatgagttaaaggtagaagttcctgttgtatctgacaatcagattcgttgggatggagttactggtgcaaaattagttatttatcc

SEQ ID NO: 1102 - DNA, 200 bp, Lawsonia intracellularis
agcaaaggatgtaacaaatgctgctggacaaggacgtattgcttatacagggtgtgtcgttacatctgttggtgaagcatataaagttgaaggagaggcaagacggacaatttctttgttcgcaacagatatgattgaggaataatatggaaataagcggtcagttggaaattggataccaagatgatcaaggatgtttt

SEQ ID NO: 1103 - DNA, 200 bp, Lawsonia intracellularis
cataaaacctttactatgcgattagctacacttgaagatattgaaaaggctattgaagcagcaggaataggtgcatcgacagcacgaatccgtcgttatgaatgggcaagaacgttaacacaacttggttcatttaaggatgaggcaattactcctgaaatgttagctactcttgcttcgacagagtttggtatccttga

SEQ ID NO: 1104 - DNA, 200 bp, Lawsonia intracellularis
ggatgcacaggaaacactaaggggaaagctaaaagccgtgagcaatgcctcaaagaatacagagtgttagagctttgcttacggcaaatgggttttagcttatctgagattcgttctatgtcagtccaagaagcagagggatttcttgaatgcagacaccaacaagtcagacagcaaaaaatgccaacaacctatctaag

SEQ ID NO: 1105 - DNA, 200 bp, Lawsonia intracellularis
cttgcggcaacgataggatctattgttagtatgctacttataatcctagttttgtttttggtaatggatgggatacttctgtggtttttgtgttaacatagtgtaggttaggtgaagagaatatgaagaatactaatgcgttagacactattactcttatggatgaaaaccaaaaagaagatgccaagttacatccaggt

SEQ ID NO: 1106 - DNA, 200 bp, Lawsonia intracellularis
tctgcattggatatagagagagtcgttgctaaacaatatttcccattacctatagaagattatagtgatgtcccttttgagagaatagagaatacacagccctcagattttggagatgcaacaatacataataaatataataagcaagtaaaagaagcatctttcattaatacagaaacctatagcagggtgagttctct

SEQ ID NO: 1107 - DNA, 200 bp, Lawsonia intracellularis
ttcttcagaaccattgagaaatgttgtcccacgtttttcttttgacttttctacatctatggatggtagtggttatataaaagagagcaggttatctccatataaagaatatccacaattagcaccaacaccattattgtataatgaggtatctatggtgcaggccacaacagagaatactactaactcacaacatccat

SEQ ID NO: 1108 - DNA, 200 bp, Lawsonia intracellularis
tatttactgaacaacaatgccagctcccgcaggtaactactagtccacagatagcgttagttatgcctcatgaagaacttgactatgttcccataagtaagaactcctcaatgattggtaataatatagattacactacattaaagagttcttttttttcacaggaagatagaatagttgataaatatactagtgataga

SEQ ID NO: 1109 - DNA, 200 bp, Lawsonia intracellularis
gacaaagagaattttattccttttttatctcaaacacaaaatacaaataccttgtttgaagatatagaacaatcatctaatacagatgcattggaacagcaaatacatttaatgacaactatagaaattgatggacaagtattaggtgaattttttgaacgctatatctctaaccaatcattacgaacctagtatctata

SEQ ID NO: 1110 - DNA, 200 bp, Lawsonia intracellularis
tattgaatgtaactatttttttatctatataaaaaaatttttttatatatttatattatttcccaaattatagtaataaaatgtaccttttttatttttttagtacacaaaaataatactatagagttatacatttcatatgaaaacaatcttaaaaaaaataggatacgtttaatagtaaatattaaggatagtatagt

SEQ ID NO: 1111 - DNA, 200 bp, Lawsonia intracellularis
agataattattttttattataatgatgtatcctattttggttgattgaaataatgatagagtaactattgtgttgtggtgaagctctttggaggttgtcgatagatgggttggaatacagatttacttgatgcacaatttagaggcattcctttttatgtacaatcaattacagataaaggtagtaagtctttagttgtg

SEQ ID NO: 1112 - DNA, 200 bp, Lawsonia intracellularis
catgaatatccatatcgttcaggtggagccgtggaagatatgggcagttcagcaagaactatccctattcgtgctattttttggggagagaattatcttagcaatctccaaaagcttattgaagcactagaacaaccaggaccaggagagcttatacatccagtttttgggagtgtaactgttgttattaaaacatggca

SEQ ID NO: 1113 - DNA, 200 bp, Lawsonia intracellularis
gattgatcatacagcacaacatcctgattatgcagaagttgtatttgaagctattgtttcagcattagatacaaatttttttacacatactacacaaagaacacaggcagaacaatcgtctcttactgctaaaaatgctgctacagtcttattagagcattcatctcaacatgtaactaggcatatccaaacaaacttta

SEQ ID NO: 1114 - DNA, 200 bp, Lawsonia intracellularis
catcacctagagtacaatctcagacaatgcaactattaatggacatattagatttttatgatccatcgggtgatgtgccacgttcaactactatttttgttttgcatccagaagcatatcttgctgaacttcttgctgttcaaaaggctatcttagaacatatcccagtgtcatcagtaatgaaaggatttccttattgg

SEQ ID NO: 1115 - DNA, 200 bp, Lawsonia intracellularis
tctgattgtttcccaaaaattacaccaagttgtggaatgaaaacgtttgaatacaatgaaaagtatcctacaggagtaggtaattgcagtgttcaatggacgtctaatggaagtccaggagtacatcctcaagtgccttctttagctattcctcctaatagtactatagagaaatacgttgttcaggatgaaatagcctc

SEQ ID NO: 1116 - DNA, 200 bp, Lawsonia intracellularis
agggtgcgatgtaagtatgtcttctcaacatatcatagctataggtattatattacacgtgatactgagtcagacagctttagctattcttacagcaagtcaattgtttttggatgagtgtactacccccacccttacacctcttcaacttgatacaattgtaggtaatattcgtgcacgtattcaagattgtcttgttg

SEQ ID NO: 1117 - DNA, 200 bp, Lawsonia intracellularis
cagtcagaaagaatgttccaacacaagatgtccatgggttttcagaaccattaagaacagctgcagaagctattcagtcacttgggacaatagctctcaatatacgtccaccattgatcacatatactgttcagcatgaggagagccttcatttatttattagcacatagactatatggtgattataagcgtgctagaga

SEQ ID NO: 1118 - DNA, 200 bp, Lawsonia intracellularis
gatcctccatttaaatccacagatatatgatccaaattttcttcctgctggacaggaactccttatttatgcagccgatgggaacactgtatgaatacagtaacaactattcgtgatgtttgtcctaccttgtgtgttgctggtcatatgcatagagactggttacgatattcagtggattcaggtttctttactcctgc

SEQ ID NO: 1119 - DNA, 200 bp, Lawsonia intracellularis
tgatggatggagtgtaagtcttggtcttccagatggtaaactcccttcatggcttgcattatgggctgaagtagaacttgcttttgatggaattgttgcattaacaggacgtattgatcatatccgtcatagtgtgaacactaaaggacactctttggaacttgctggacgtgataaagcagggatactcctagattgtt

SEQ ID NO: 1120 - DNA, 200 bp, Lawsonia intracellularis
cagcgcctatttttgttacacaacagataacgcttcctgagttgattgctactgttgtaagaccgttagggattgatactatcgatgttgatacactttcaactttattgtttcagaaaagtacagtagagccaggaatgacagcatgggaagctattcaggatgctgcatcagctaatggattatggccatggtttact

SEQ ID NO: 1121 - DNA, 200 bp, Lawsonia intracellularis
ccagatggaacgctaaagattgctcgtccagattattcaaaagcacctgtcgcttgtttaaaccttagatgttcaggcgtaggtaataatgtccttgaattaagtgtaacctatgatatcagtaagcaatactctactgtaactgctctttctcaatctcaagggaatgaaatttcacaggcaatacctatccttaaatc

SEQ ID NO: 1122 - DNA, 200 bp, Lawsonia intracellularis
tgttgctacagattcagacacaccatctcgtccattagttctcaggaaaggacatattgataatacacagtttttaacaaacatagcagagaatattattcatgaagggaaactttgtagtgttacagtgatggcaaaagttcaggggcattttgttgagcctggagtattatgggaaccaggacaacgagttactattt

SEQ ID NO: 1123 - DNA, 200 bp, Lawsonia intracellularis
ttagtgaacctcatgaaatagatgaaacgttttttcttacaaagagaacatttataggtggtcgctttggaacgtttacactgttgaagttacagcaagacaatgtatggttgagtacatagtgagatattcaaaaagatggtagattataatagtaccatgtatcacaaaaaaaaggaatctttatgtctttttatgat

SEQ ID NO: 1124 - DNA, 200 bp, Lawsonia intracellularis
gcagtgaacaagcaaattaataaagcacttgttgctgtaagacttccatttcgtgcccgtttgacaaaacttcagacaaaaacaccattgcaacttgtacagggagaaggtctttcacaagaacaactacaatctgtagaacttctgcaacagtttgggtttacgtcaggtgtccccatagactctcaattaattgttct

SEQ ID NO: 1125 - DNA, 200 bp, Lawsonia intracellularis
tccaatagggggaaagactgttcattcagttatcattgcaacagaaaatacagcatttcgtgtccatgttgaacatggtgaaacagctatttacaatcaatggggagcaaaggttgttcttaaaaaagaaaagattgttgaaatcgactgtgaacaacttcaaattaaggcaacaaaaggtatcacaatgcagacagagt

SEQ ID NO: 1126 - DNA, 200 bp, Lawsonia intracellularis
cattttctctctctgcgtctgaagcaaagatgaagacaaatcttcatgttgaaggagatgtctctctatcaggtaagctagaatcagatggcgatcaggttgctgcagggatttctcttttacagcatacacatggtggtgtggagtcaggaggctcaaatactcaacctccctctaagtaagtgtggggtggggacaaa

SEQ ID NO: 1127 - DNA, 200 bp, Lawsonia intracellularis
gatacaatcgctattcaggggaaatagcgtttttggtgatagagtttctagtccccacaggtttatgaccttttttgacctaacagaaaagtactacatattatattaagttatattaatgaaggatcagatacttgttgtcgttgatattgggtctgtttgtatacgtatcttttttccagtaagagtaaatctcataa

SEQ ID NO: 1128 - DNA, 200 bp, Lawsonia intracellularis
taccaacaagtccataaaaaacagggatcatagaaactgtaaaaaagagtttccaggaatagctgttaccaataagtggaagaatctgttctggaggtagaatcccaaatagcgacatcacactgataacaatagatgtatcaattagaagggatatagacgtactaccactacttcttaaccacagatatttacctttt

SEQ ID NO: 1129 - DNA, 200 bp, Lawsonia intracellularis
gttattttacgtatccataaataaaagataatatcaaaagcttgggagatataacaagctagaattgaaccaataaaagctacactataaaatccaaagacattatggaatgtatcattatcaagctttgaccattcagtagcagtaagagaatccataaacataaggataccagcaacaacaatattaattatgatggc

SEQ ID NO: 1130 - DNA, 200 bp, Lawsonia intracellularis
aaactttacacaaaaattagctcgctctttactataaaactcagtgataaggtctgtaagaaggaatgttaatggatagagtatggcacctaccgaaatttcaaatgtatggaatggcaaaataggtaatgcaacaaatttttgataggtaaggttacttagaacaataaggatagaaaacaatccacaaagaccagtgt

SEQ ID NO: 1131 - DNA, 200 bp, Lawsonia intracellularis
atactttttctgcttttgtcattggagttcaagaatattattatttataggttttttctctttactcaatcagaatcaagtagaatatcttattataagatatcgttgtataatgtctaggggatatttattttttatttgtaaatgtcattagctctagtataccagtataaaggaatatctttcatgtctaattaagg

SEQ ID NO: 1132 - DNA, 200 bp, Lawsonia intracellularis
aataggatatctaggattcaagagtagtttttataatggaggagttgtttgtcgttattgttattggatattacatagtgaacatgtagtaccaatattttttgtttagataccctatttaatgtagttgtatctaattggagggggtattacatgggatcatttgttttaacagcaacaacttcaacttcaatttgaga

SEQ ID NO: 1133 - DNA, 200 bp, Lawsonia intracellularis
gtgctcacggagcatactagcagcatgaaatctacactcagggttgtatcctaagaagaagtgatcgtatatgcgtttaacaagtttgtagtttgatgggttaacaagagtaatacttacttttgttacatgatggaagccaaggccagaggctgctagtgaagcctctatatttttcatgacttgttgggtttgctctt

SEQ ID NO: 1134 - DNA, 200 bp, Lawsonia intracellularis
caattgtttcagggatagtatttgttgatggatctcttggtaattcacagagatagatacactcgtttgttagaatattttgtggatatggatctataggccgtacaggagtaatagctgaaatagcattaatcatagttttatccttatagactaactgggtgagtatgtcatagagtggaaaaggaagataaaggcat

SEQ ID NO: 1135 - DNA, 200 bp, Lawsonia intracellularis
tgtaagaaggggaaatgtggtattattaagatgcttgtactttaatatatatgacagaataaaagattgacaagagggtaagagcttttttgttatgtattactaataattactagctattttttttagtagtatatatagtagatagttctttttagaaggaaataaaggataagttaataagcagttagtagaacaag

SEQ ID NO: 1136 - DNA, 200 bp, Lawsonia intracellularis
ataattgttgtattaatcatcccaaatttttatatgtttcaatagttgattatatgttttgcgataggcataactagagagtttctttagagtcgcttttgttgatatctgcttagcttgttgggctatattaaaaagagaaaaccatttatctataatatgttgtcttgtaaaagtatttgcttgtattttataatgat

SEQ ID NO: 1137 - DNA, 200 bp, Lawsonia intracellularis
taagaatgcgtgtatattcttcaggatgttgtttcattctttgaatgtattgaataatatcgtttgttgattgaacctcaaagtagtcatcgggatgttttcgtaatgcttgataggcaggttctgctccaagaagcgcaggagtatttgcatgccaagcattaaataattttgaaggaggttttgtattcaatacatat

SEQ ID NO: 1138 - DNA, 200 bp, Lawsonia intracellularis
ttagaaactttaggccgccaagcaagaataagatctgtattggagtaatccatccaattgcctgcattcattacatgcagtttgatattgatatcttttaatctttggataaaagctggagaatggatagcagggggtaaatattgtgcactaccaggaatagatattcgttcgattgttgttcctctaagaggatttct

SEQ ID NO: 1139 - DNA, 200 bp, Lawsonia intracellularis
tggtatgaggcctggttgtatccatagtgggatataatggacacgttgtgtttgagggatggcaggattttgtataatacgtattccggaataagggacttttggtctatctgcttggacaacaataggataacaattaaaaagaccataacacggttttgcatgatcgtaatggaaaatggatatagcgtcaggcattc

SEQ ID NO: 1140 - DNA, 200 bp, Lawsonia intracellularis
catgttctacaattttaaatgtatatccttttgtatcagataaatgagagagaataatccatgtttgtaaaagccatacatctacaccacttgtaagttctggagcaatctcctctatagagcattcaccttttgctgcttttttgagctggtttgaccatttagcttgatgatgtcggggaataacaaagtagattata

SEQ ID NO: 1141 - DNA, 200 bp, Lawsonia intracellularis
cacatagttggttatctttttttttttttacaaaccctactaaagtagacactaataaacatagattataaaaaatagtattataccatattatatattgttatttattatatgttgtaaataccaattatatgtttttttgattccttcatagagagatattgttggtttccaaccaaggcttttaatttttgaaatat

SEQ ID NO: 1142 - DNA, 200 bp, Lawsonia intracellularis
ctaaccatttttgaggagtgccatctggttttgatggatcggttacaatttctcccttaaatcctacaacatctgcaatagtttttgaaagactatagatagtacaatcttccccatagcctacattgataggctctagttctgagtatttctccattaagagtagacaggcagaagctacgtcttctacatataaaaat

SEQ ID NO: 1143 - DNA, 200 bp, Lawsonia intracellularis
tctcttcgtggagtgccagttccccaaatagttacatatggtaaattattaaccatggcttcatggaagcgtcttaaaagagcaggtaaaacatgactttctgtaagatggaagttgtctcgaggtccataaaggtttgtaggcataatactgatggcatcaaaaccatattgttttctatatgcctgacagagttttat

SEQ ID NO: 1144 - DNA, 200 bp, Lawsonia intracellularis
ccctgcaattttggcaatagcataccattcattggtgggttcaagaggaccagtaagtaagtattcttctttaattggttgaggacagtctcgtggatagatacaagatgaacctaaaaataaaaatttttttacaccatatgtatatgctgtttggataacatttgtttgtatttggagattatcagagataaatgttg

SEQ ID NO: 1145 - DNA, 200 bp, Lawsonia intracellularis
ctggataaatattatttgcctgaatgcctccaactttagcggcagaaaaaaagacatattcaggacgttctgttgcaaaaaaggattctacagctgcttgatttcgtaaatcaagttcttcttttgtacgtgtaataagattggtatatccagcagattgtaatgtttggacaagcgcacttcctactaaaccacgatgt

SEQ ID NO: 1146 - DNA, 200 bp, Lawsonia intracellularis
ccggcaatataaatacaagcattttttttcataataacactttgtatatagattggtaagatgtattctatattatactagaatgaagatatagcaagtgtagtagatatcatagaaatatgctttgttctgtacttgtggtatattcaacaagcaagcctttaaggtgttagttaatagaaaataaagttgggtataca

SEQ ID NO: 1147 - DNA, 200 bp, Lawsonia intracellularis
gatactggcgtgagtaagtatggattatagcataaagtgatagtggcttatactaataaatagagtaccattaacatggtgtatgttgaggtaatgggttatattatattcacaggacgtatgagtgtattttttagataatgtaatgtgtttctaataaaagttggggccaatgtataaatatgttgatataattattt

SEQ ID NO: 1148 - DNA, 200 bp, Lawsonia intracellularis
tgaaagttcttcaaaggcagtatatcgaggaaggaaggaaagttcgactgtacctgtccgaccattacggtgttttccaataatgagttcagcaataccttttttaggattatcttcttttttattatacacttcatctcgatagataaacataacaagatcagagtcttgttctatagctccagattctcgtaaatctg

SEQ ID NO: 1149 - DNA, 200 bp, Lawsonia intracellularis
aaagtaaaggtcttttatctgcacgttcttcaagtcttctattaagttgtgagagggcgacaacaggaatatttaactcttttgctagagctttaagagaacgagaaatatcagagatttcaagttcccgtgagtctgcttttcgtggagaacgtagcagttgaaggtagtctacaactataagatcaaggttatgttct

SEQ ID NO: 1150 - DNA, 200 bp, Lawsonia intracellularis
attttaagtctacgtgcttgtgagcgaagttctaacatagtgagtgctggtgtttcattgatataaagaggtgcgttattaagcaattctgtggtttggaatagacgctctccttcttctggactcaagcgtccactgcaaaggttatcatatggaattttcccccataagctggccatgcgttgtataagttgtttatc

SEQ ID NO: 1151 - DNA, 200 bp, Lawsonia intracellularis
tgacatttcaagggaaaaaatacctacagttgctttttgtgtgattgctgctcgcatagcaaggtttagtgctagagctgtcttccccattgcaggtctggctgcaataataatgagatctgaaggctgtaaacctcttgtaatttgatcaagagctttgtatccggtagggagccctgtgacgccatgtgttgctggtt

SEQ ID NO: 1152 - DNA, 200 bp, Lawsonia intracellularis
gcatggctgtattaaggagatcattaataagtgaatgtacaggcttaaagacacctacattttttctagcagatacattcatgatggattgttctgctttatctaaaagggttgaaagttcttgagttgtatcaaatcctgacgtaacaatacttgagccagcttcaataagactacgttgtatagctttttcatgaaca

SEQ ID NO: 1153 - DNA, 200 bp, Lawsonia intracellularis
atttttgcataaaattcagcattggcagcactaacacctaattgaacaagttcacttagatatgatgctccacctatagcttcaagttgatttttatcacggagcttttgagctaatgttactagatctataggttggttctggctatataaagtaatggctgtaaagaaaagaatttgatgctgagggaaataaaaatc

SEQ ID NO: 1154 - DNA, 200 bp, Lawsonia intracellularis
ttctgcttgtaagtcgatagccatttgtggtgctatagatttacgtaataatagtcctgcaagaacggcttgttctgcttcaaggctatgtggaggaacacgtagtgtaagatcttgtgtagctttttgaagacgttcctttgttttagccatagatacttcccattatatggatataataaacaacaagtagtatgtat

SEQ ID NO: 1155 - DNA, 200 bp, Lawsonia intracellularis
atattttttgaaagtatatccatgtctatatgtatatcatttgaaagataaacagccaagatctggtatagtcatagggtagttattttaattatagttagataaggagtaaccgtttttaatttcaaagaatttaaatcctacttataaccttatatggtaaagctataatgattgaaataagaggtttaatatatttt

SEQ ID NO: 1156 - DNA, 200 bp, Lawsonia intracellularis
attttgtattttaaataggttagatacaaaatatattattatgttctgaagaacttgccaacttttttttcttgtttattatatctaataggtaattttaattaaaaacttttaacccttttaagagactatgttttttaagtagccttggaaaaacctttaaactttttttaagaggtcttgtcctttaggtaacttta

SEQ ID NO: 1157 - DNA, 200 bp, Lawsonia intracellularis
gttaaaaaacttttaaaccttttaagagactatgttttttaagtagccttggaaaaatccttaaactttttttaagaggtcttgtcccttaggtaactttagttaaaaaacttttaaaccttttaagagactatgttttttaagtagccttggaaaaactgaagtctattttaagaccacgtcaaccttagggaagatga

SEQ ID NO: 1158 - DNA, 200 bp, Lawsonia intracellularis
cgtggtcttactatttgtgataatgtatcttgatatgtttttacaggatatttttttgaggtatgtttatttatcttgtatagttattgaaatagttcttattttgcttcattattatgataattgtagtatctaataggaatcaggtttagctgtaggttaaaataaataactatggtaggttactttatgaagcgtgc

SEQ ID NO: 1159 - DNA, 200 bp, Lawsonia intracellularis
acttattacaggaataacaggtcaggatggggcatatcttgcagaattccttatccgtaaaggatatgaagttcatggtattaagcgtcgctcgtccctttttaatacagatcgtattgatcatctttatcaagatcctcaggtagagaataggaagttaatccttcactatggtgatcttacagatgctacaaatctta

SEQ ID NO: 1160 - DNA, 200 bp, Lawsonia intracellularis
tccgtgttattcaagaagtccaaccagatgagttatataatttagcagctcaaagtcatgtaaaagtttcttttgaatctccagaatatacagctaatgtggatggccttggtgctttgaggcttcttgaagccattcgtattttgaatcttatagataaaactcgttattatcaggcttcgacatcagaattgtatggg

SEQ ID NO: 1161 - DNA, 200 bp, Lawsonia intracellularis
cttgctcaagagatacctcagacagagaagacgcctttttatccacgttctccatatgcatgtgcaaaactctatgcttattggataacagtcaattatcgtgaagcatatggaatgtatgcttgtaatggtattttgtttaatcatgagtctccattacgtggggagacatttgttacacgtaagattacccgaggatt

SEQ ID NO: 1162 - DNA, 200 bp, Lawsonia intracellularis
agcaagaattgcacttggacttatgtcaacattgtatcttggaaaccttgatgcattaagagactggggacattctcgagattatatacaaatgcagtggcttatgttgcagcaggataaaccagaagactatgttattgcaacaggacgtcagatatcagtaagagagtttgtaaatattgctgctaacgagttaggta

SEQ ID NO: 1163 - DNA, 200 bp, Lawsonia intracellularis
ttacactttcttggaaaggatcaggggtagatgagcaggctattattgaaactattgatgctacaaagcttgctcaaatgcttagacgtcctgtgtcagaagcgccattaaaagttggacaggttattataaaaattgatcctcgtcagtttaggccaacagaagtagactctttaattggagatgcttcaaaagcacag

SEQ ID NO: 1164 - DNA, 200 bp, Lawsonia intracellularis
caaaagcttggatggaagccaatgatttcttttgaatcaatggtgacagaaatgctccaagaagatatatcactagctacccgcgatgccgtttgtaagattgctggctttaaggcatttaatcatgatgagtaacactacatgtctattatttagttattacttttattcagaatgttagtatattatatttagtctaa

SEQ ID NO: 1165 - DNA, 200 bp, Lawsonia intracellularis
atgttataccgtatattactgttaatcatataatatatagttataaatttcaatatgtaatctgctaacatagtttactctatatttttttctacaaaatagtataatataaattaagacatttttaagtatatatgtaatgtataaatattattatgaataaacatataagatttttatattgtatttttaaatagata

SEQ ID NO: 1166 - DNA, 200 bp, Lawsonia intracellularis
agcctattaatttctttattaggtatatactataacaaattaactcttattttataggtgttatttgacattatatagaaatatagttctattttcaatgagtatagaataggccaaatgaaagaatgaataataatttttctaaaaatttaggccttattattagagctattagaactaaacataaagatgaaatagta

SEQ ID NO: 1167 - DNA, 200 bp, Lawsonia intracellularis
ttagatagacttgcagaactctcaggattaacaaaacgttatatccagatgattgaaagaggagaacgaaatataactgttataaatcttttcccattagcaaacgctttggatataccaattatacaacttatagaatatcttaattatacattagaacatggtagtttaccagactttcttcttgaagtactaccaat

SEQ ID NO: 1168 - DNA, 200 bp, Lawsonia intracellularis
taagaaagttggacggcctaaaaagaataaaatacgtaatacaatgtcttaacattattaatagttatagttgatagtattaatttagttaatggatggtttttttgataataaaaaaaaagactgaatttcgtcagtcttttttttatcaaaagaagacctattcttttttcctttagtaagttttttgaaaaaaggaa

SEQ ID NO: 1169 - DNA, 200 bp, Lawsonia intracellularis
gaggaactatgcattgtaacgtaaagtttgttaataaagtatgtagtgctagaagatggtttagtatatgtgttatccttacggtgttattatttttagctttagttattttttcaccaaggcaactacctgttatccattataaatttgcattatgtcttttagctggtttggctggttattggcttgatcgtgtactt

SEQ ID NO: 1170 - DNA, 200 bp, Lawsonia intracellularis
tttccttttgctaatcctagtggctatctatgtgaagattggaaagaacatattaatgggtgtcaaactggacgtgctgattacccaatagtgatagaatatcaaaaaagtttttgtacggctatgttacgtcaagcagctattgttgtaggaacaatgttagctgtaagtttaggattataagttttttgttaggcgtt

SEQ ID NO: 1171 - DNA, 200 bp, Lawsonia intracellularis
aacagcaggacgtgtatgttagcgtctaacatatgttaacacatactcctctccctactttttataacatattttaatcgaatttattgtaagtagtttttgagagatccagggatatttacttttagttgaggcataagagaaagaagacattttttaagaggaagaagataaaggttaaggttccatggatgaatctt

SEQ ID NO: 1172 - DNA, 200 bp, Lawsonia intracellularis
tattgctttgccataccaagataaggcactagaaatattttttgttccaaaagcagcaataacagcaagtttaaatgcaagatttgagtagctcttttttttgatatgttcaggaatagtaggatgttctatgtgttttttcatataataccattcatcttggagcgcttgggaggcatacttttttacagaatttcttg

SEQ ID NO: 1173 - DNA, 200 bp, Lawsonia intracellularis
tatgaatacgataatattttaatgggattgggatatgaataacttgtgtaaaagatgatgactttgaataaagatatgcaaggattcttaagataaaatctctatcttctcctacaagaagtgtcgtatcaaatactccaatatgttttataagctgtgtttcaacaagaaatgctcccattgtgaaataggtatgttga

SEQ ID NO: 1174 - DNA, 200 bp, Lawsonia intracellularis
agaaagtcccaccatatatttcctgttttatggatatccccccaaggttgtggtttttttttgtaggttacgtccatgaacatgacagtattacaccaactaagcttagaccctggtgatgtttgaagtgcattaagcattatttggagaaattgggagtcccaaagatcatctccatcaagaaatgcaatatattgtcc

SEQ ID NO: 1175 - DNA, 200 bp, Lawsonia intracellularis
ttttgcatgactaagacctgtattcctagcagcagagacaccttgatttgtctgttgaagaatatgcaatcttggatcatgtatttgttgaatagtaggtacagtattatcagtagagccatcatcaataatgatacactcaaaattagagaaggattgctttaacacactatgaatagtgtccgtaatccatggctcca

SEQ ID NO: 1176 - DNA, 200 bp, Lawsonia intracellularis
tattataggtaggtataataatggatattattggcgaagtagggctcattgtttggtttgaaaattatagagcattgatttgaaaaatgatccaaaataggcagcatcaacatgttttgccattcgtaatagcgttcctttaatagtacgtgattctttttcaagacgctcaagttgtgtaagaatgtcatgaagatacg

SEQ ID NO: 1177 - DNA, 200 bp, Lawsonia intracellularis
gtaagtgtgctaaacaacgttcaataattatgtgatcaaagtgtgtttctgtgtttaattcttccaatgctttttgaatgctatttaagcagttattggcacgatctgcaataagtgaaagataaccatgtttttctttaaagtatttttggtttttgaaccatattgatgataattctcttgatggaagttgagaaagt

SEQ ID NO: 1178 - DNA, 200 bp, Lawsonia intracellularis
gttccttctccataatgccatacaaatgaagcatctgtataagcaatctgaaatccatgttgcttaactcttatacaataatcgtcatcttcaaagtttcctttctggaattgctcatcaagcaagccaacagtttcaatgcattgcctactaatagctacacagaaaaagcaaagcattgttgtataagttaatgtgcc

SEQ ID NO: 1179 - DNA, 200 bp, Lawsonia intracellularis
tttctggtggttcatataggcaatagcagcctcttcccatgaatcattgggtttaataggttttttagatgatctattattagtattattaaggtacccaggaagtacaatctgttgaggactaccaatacgatttgttacaggcccaataagaccaagttttttattatgtttaagaggttcaataagaggttctaacc

SEQ ID NO: 1180 - DNA, 200 bp, Lawsonia intracellularis
accctggaggaagtaatgtatcattattaagcaggatgataaattctccttttgcttttttaagtccaacattatttccagctgcatatcctagattttttttattatctataactgtgagatgtggatatgataactgttgcatccattccactgtcccatcagttgaaccattatctactagaataatttcacaattg

SEQ ID NO: 1181 - DNA, 200 bp, Lawsonia intracellularis
tttggtgttgtttgcagtaggctttctatacaggggattgtatatgatgcatgttgattgtatgtgaggacaataatactgatttctggtgaagatgaatatgtcataaaaataagtatctatactgttattctaaatagcataagagtataacagcatacagtagttataataggttaaacgtctttcatctgttgata

SEQ ID NO: 1182 - DNA, 200 bp, Lawsonia intracellularis
aatactatacgatatagtcttaaaaatcatctttaattttagtaaaaattttaggcaggattagaatattgtataaataaaaataaaaaaaatatattaattattttagatggttgtatggaaaatataataagattggcatatgctgacattactcaatctttttttttataaatattttatgtaatatttacgaatgg

SEQ ID NO: 1183 - DNA, 200 bp, Lawsonia intracellularis
atgcagaacttgacgttagaacaggtgattacacgtcacatcaaatcaatacccttgcaaatgcggtatatattcgattgatgacccctcttgggacttggtggcaggacataactcttggctcacgattgcatgaacttgagcgtgagaaagatgttcaacgtgtacgaatacttgctaagcaatatgctgaagaagct

SEQ ID NO: 1184 - DNA, 200 bp, Lawsonia intracellularis
ctagcacctttattaaaagagaaaagagctaaacatattgttgtgtcagcagaaataccgactgctgggcaatgtacattatatataaatgttgaagatgctactggccgtccttacacattcagccatactatgagagtttcctgatgccatatgatataccagattttgaagagatccgtaatcgtattttaagagac

SEQ ID NO: 1185 - DNA, 200 bp, Lawsonia intracellularis
actcgtaactttgaccgtgatgcacatataacaccagatagtgatcattatataagagcatcagcgacagcatctgctgtagaagggctttatgatcatcaaagttggataacaagacaaatttttccagatacataagactctgaatttttagaagttcatgcacgtctaaggggtattgtaaggaaaccagctacaag

SEQ ID NO: 1186 - DNA, 200 bp, Lawsonia intracellularis
agctacaggacatgttattatttctggtttatcgggcagtgttgttcctttaggcacacagatcaaagatacccaaggggtcctttatgtaacaactcaacatgttgtgcttacatcagaaacagctagtcatggtgagcaattacaagttatgcaagttgttgcatgtcaagctcaaaaaccaggtcttattccttcat

SEQ ID NO: 1187 - DNA, 200 bp, Lawsonia intracellularis
gtcaagatgttttagcaaaacttgttgcccctcctataggtattgatacaaatgtgcttcttactattacaggtggtagtaatgtagaaacagatgcttctctattagcaagacttcttgactatatgcgcgatccaccaggaggaggaacagctcttgattataaacgttgggctatggaggttcctggtgttagcaag

SEQ ID NO: 1188 - DNA, 200 bp, Lawsonia intracellularis
gcctatgtatatcctcttcgaagagggataggtactgtggatattgttattacaggtgaaaatggtacaccttctacagaggtgattactatggctcaatcacatattgatacaatgaggcctgttacagcacgatcagctgttgtttttgctgcaacaccatttattgtaaatatggaaattggattaacattaagtgg

SEQ ID NO: 1189 - DNA, 200 bp, Lawsonia intracellularis
ctctgaaacacttcaaacaatattaccagttgttaaagatgcattacaacacgtgtataatgattatgagccaggaagtggtgtagtcttatctcatttaatagctgcactaaccagcgttcctggtgtttctgatgctgttattatttctcctgaaagtaatataactgctaaccctgttaaaatacctattttaggtg

SEQ ID NO: 1190 - DNA, 200 bp, Lawsonia intracellularis
aagttaggctaagggggttataggagaatgtcctatacagaattgctttcaaagttacttcctataaagagttataatccattagaaaaacgtcttgctctttctttacatgttgaagggaggattcttgatcaagcttttgctgattgtacatctgtggttggtggattggaacctttcaaaaatcagcagtggatagc

SEQ ID NO: 1191 - DNA, 200 bp, Lawsonia intracellularis
aaattgggaacgtatttatgcgttacctggaaaatattttaataaaaaaatgatgtatcaagaacgtattcaacttttagtgttggcgtttcaagagcggtcaggtatttctcgtgattggcttaaacgcatagctttacttgttggatatcctataactattagtgaatatcgaccttttagagcaggctcacaagtag

SEQ ID NO: 1192 - DNA, 200 bp, Lawsonia intracellularis
gagaaaaattaacaaatacagattggttatatgcttttactgtacatgcatcagggaatatttctaaacgttttcgttcaggatgttcaaaaactggtgagcagctttctgtttggggaaatgaactattagaatctgttattgaaaagtataaaccagcacacagtgttgctttttttgcttatactgattgagaatat

SEQ ID NO: 1193 - DNA, 200 bp, Lawsonia intracellularis
tcatgcatcccatcttttaatttatggtagtaactaaagttacagctcttttattttagttatctacttcttttcttttgattaggttcttaacttatctagattaaatagattatcttatatttgatgcatatcatgactgtatcagtgttgatatattattattattattattattattattattatttattatcttc

SEQ ID NO: 1194 - DNA, 200 bp, Lawsonia intracellularis
cttatataactattaagaattattataaagagatatggatggaatattgttctaatagagataaaaataagaagaaggttaaaggttgctaggaaggattataaatgaaccaaggggatattttgtgttgttgtgatttcttgaaaacatagggtttcctcctctcctactattgttttcaatgagctcttcatttttag

SEQ ID NO: 1195 - DNA, 200 bp, Lawsonia intracellularis
ggagggggttgaagagtcttcacagaggttacacaaaagggtgttacccccttggggaatttgtaatactatttaaagaataaatactattaagtgagaaagtagtagttggcttatagagcgttactctttcctgaacatgataggaagttattacaaatagatttataaatagtatagatagctatatttgtcatttt

SEQ ID NO: 1196 - DNA, 200 bp, Lawsonia intracellularis
tctaagatttgttagtctacaaacattattttgtgtatttgttaccattaaagggatatccttttcattaataactttgctatattttttgttaattttttaggaaagtatttttcatttagtagtgataacaactaaaaatattagtttaatatttttagtattaagcagtattatataagcagtttactaaaatatta

SEQ ID NO: 1197 - DNA, 200 bp, Lawsonia intracellularis
gtaaactaatattaataactatactttttttttatttttagcaactatttttttcactattactatttattaggtatccagtcatttttttaagctaagttttttagtgagcgttggtgcaatagcagccatacaaagagttccaaacagtgaagcacttccaagagcaaggaaaagcgctgcataattattggttagtt

SEQ ID NO: 1198 - DNA, 200 bp, Lawsonia intracellularis
gtgaagtaggaatattcatttctggatggataccaacttgagctgctataaatcctccaaaaattgtagcaagtgcttgtgaaataaaccaagcacccatcatgaatcctgtacttctttgaggagcaagttttgctatcatagcaagtcctaggccactgattaataattctccaatactaaggaaaaagtatgtaata

SEQ ID NO: 1199 - DNA, 200 bp, Lawsonia intracellularis
acaacccagtttccagagataataccttcgcatgattgtgtataacttgcagcaacacctaacgataaaaaggcaagagcacaacagaacattcctgcagcaaatttagaaggtaaagagacgtattttgctgagtggctaaaaatatatgccatgatagggcttgcagcaataatccatacaggattgagactttggaa

SEQ ID NO: 1200 - DNA, 200 bp, Lawsonia intracellularis
ggctgcaggttctataggaaagtctaaaatcatatggtctgtgcaacggataacaaagagattaagggaggttggcatttgttgatagagaatataaaaaccaacagcttcgacaataagaaaaaggcaaacaataagtttttttctttcttgactattggaaagtttgatttctcgaaagatcataagtaatactataa

SEQ ID NO: 1201 - DNA, 200 bp, Lawsonia intracellularis
ttgcagcacagtataacatggtataggcaatataaaggtgactaagtaaaaccatggaaataccactgatacctattactatactgagaagaacaacaatatcacctagggatagtggttcaaatcctggaggtgaatcaagacctacaagccattttcgtttaattataaaggctaagatagcaagagtgagccctatg

SEQ ID NO: 1202 - DNA, 200 bp, Lawsonia intracellularis
acgctgcttccaaaagccatatggaatccaaatgctgtataaagatatggcacaataagcatggaaataaacgagcctaaattaatagacatataatataatgtgaatgcgctttcggcctttggatgttcataagggaatatttttgctattaatgttgaagggtttgctttaaaaagtgtattccctgcgataataat

SEQ ID NO: 1203 - DNA, 200 bp, Lawsonia intracellularis
actaagtgccattgtgatggttccatttgtacctataaaaaggattagataaccacatagtagagtaatagctcctgctaaaagcgtacgttgggttccaataattttgtctccaatccatccgccaatgaacataaaagtatatgcaagaccaataaaggcactaaatagattttcagcagtagcatcagacatacgta

SEQ ID NO: 1204 - DNA, 200 bp, Lawsonia intracellularis
agtcttgaatcatgaagaggacaaaaatagcttgaataccataaaacccaaaacgttcccatagttctacaaaaaaaatgagtttaaaagctggggggaaatatttggatatggaagaagacatgatagttctccatgtgttgatcagtaacttttaatggatattgagtaataaaaaaagagattagattttttgttgg

SEQ ID NO: 1205 - DNA, 200 bp, Lawsonia intracellularis
aacaaataggtaagcaatgtaggatataattagaacttttctaatatataagaactcaaagtcattaaatcaacccataataaccattttttattaccactatccctatttactctaaccctttttaaatatagtatgaactatcgttcatgatatataaaggggttcatatagctagatatatgaatatactgttatct

SEQ ID NO: 1206 - DNA, 200 bp, Lawsonia intracellularis
attgtgtcgtattttaatattttttcattactgaactaatatcttatattaaatctattattgtctactactaatttaatacataaataactatatgcattattaatgtacatatattatagtaatattagttatatatttttataaatgcaaaaaatgttttatttattaaattttaattgttattcaattaactatat

SEQ ID NO: 1207 - DNA, 200 bp, Lawsonia intracellularis
taatactttttaataaaaaagttatatatatatatatagtatatttattttattttatttctaatgtatttagaaaaaaaataatatataattatatgtactattaaaatttaaattcatttgttaattaggaatacattaaatatatgtaagtttatagtaatattttataataatttttattaataaataagtatttt

SEQ ID NO: 1208 - DNA, 200 bp, Lawsonia intracellularis
atgtccatttatattactaaatacgtcattaatacttttttaagtaagtggagagctatagtagctttgttcctatgtatatgtattattttaaatagtgtaactgttactatttctgctgataaagattctgaaaaaaatataaattcttcaaaagaaaatattgcagcaccattaggggaaagtggtaatactgaaga

SEQ ID NO: 1209 - DNA, 200 bp, Lawsonia intracellularis
ttttcaacaggctgaaacatcaagtaatacacaacaacctcaagtacctaccagtccttcagggatgccagttacttctggttcacaagttgttttagatcttttttctcctcctcctcctcctcctccttcttctacaattttctctccttcctttttatgtgccccattaacactttatggtcctcctgccatgagtt

SEQ ID NO: 1210 - DNA, 200 bp, Lawsonia intracellularis
atattcctattccaaatatgggagttagaagaagttacagctccccagatattaattgtaattttgaaagaaagaatgagcatgagaaaagtggatcattaagtgttccagtcctgttagaaaaatgtatatatgataaaaatagtgagtctaagagatgtacaaatatttgtttaactatagagtctataattagagga

SEQ ID NO: 1211 - DNA, 200 bp, Lawsonia intracellularis
catgaagaaacagttaaacagaaagagaaaaagaaaaaaagtaaaaaatacgataaaaggaatataaaggaacaacaaagaagaattgaaaagaggcaacaagaagagaaagtagcactattaaagcaatatgaagaaaagttgcaagcattacagagtcaacaagcgtcacagcgtttagaagcattaaacaatggtac

SEQ ID NO: 1212 - DNA, 200 bp, Lawsonia intracellularis
tgatatgtatacattgtttagccaacaatataacgaagagcaagattgccatagggaaaaagaaaaaaaattagaagaattgttaatgttgcataaacaagagcgtgatattttttttatacctgtaagtgattctacagaaaaagggacagtagaaggtagacaagaagattatagtgatattaacaaagatagacgac

SEQ ID NO: 1213 - DNA, 200 bp, Lawsonia intracellularis
attcaacgccttctatccctgtaacagcattaaatatttttatagaagatagttcaaaaagcacaccagggaggttagaacatcaagactcatatagcaatatatcaaatgagcctaaaagcttatcgtctgatttagatgtatataataacagagacgttgtaagtagtatccctttatcattaataaatccagatgaa

SEQ ID NO: 1214 - DNA, 200 bp, Lawsonia intracellularis
gaagcaactgttgaggtctcagcaagtgaaagtttaacagagacaagtattcaagtaggacctttcccaagtaaaacatcattacttaaatattttaatagagtcatgaatgaagaaggatttggctctatacaaaaatattatagagatgatttgtatcttcctggttgtgctgtttatcagacagctaaaaaagaaca

SEQ ID NO: 1215 - DNA, 200 bp, Lawsonia intracellularis
caaaagaaaacattctggtattcgactcccatggctcaagagatttaatctttcttctaaaacaaaaactgatcttcaagatgagagtttacaagaaagttcgcctccaaaatcgttaagagaggatggaatatatccaccgcttcttcagcataaacgtcctagtgtatattatactaaagaagtaggggcaggggatg

SEQ ID NO: 1216 - DNA, 200 bp, Lawsonia intracellularis
atacaccacactcccttaagcatgtaaagtatcgtaaaaaacgtgtaggaggaatactacaatcgccagaaatccctgatttttgtaaaattgaaaagatttttagaagcctaccttctagtgaagaagagcaggaaagcgaattatgtccatcaggccctcaagggaaaatatatctttttacacttgggacacaaggc

SEQ ID NO: 1217 - DNA, 200 bp, Lawsonia intracellularis
tctgaacctggatattgtattatgagagatcctttcgaatccacttcatgttactatccttctggctctgacgcaaagagtgaaagtagtgaacaaggcttttattcttctaacctcgaaacagagaacaatacttttttgtttaatagagtatctcctccagaggagttacaatatggcaagaaaaaatctacgttacc

SEQ ID NO: 1218 - DNA, 200 bp, Lawsonia intracellularis
acttcagaaaagaacatcctgtaaaaagaataaaaagtggaagtcttcatatgttgttgacgataaacaacgagctcaaagtaaaatggagctacagaagcatcaatattatataactgactgtcttcttcgattagagaagttgcataagcaccaatatgaagtagcaaaaaaaacaggagatgacctttgttctttag

SEQ ID NO: 1219 - DNA, 200 bp, Lawsonia intracellularis
aaaagaagcaagcaaaagataaagagaggctccaagcaacacttaatgaacaatatttagaccttttaacaaaacatcaacagttaatagcaagaaatactcatcctagtgaagagagtttatcagaaatttctgaagggaatattgaagatgctgaaagtagtgagtctgacttagaaaggaagcatcaggctaaaaag

SEQ ID NO: 1220 - DNA, 200 bp, Lawsonia intracellularis
aaacggttaaataaaaagcttaaaaaactattagttgaaaattatacaattggtcggaatcaccgacaatcagttgaagaaactactaccaaaatagataaacgtcatgctcaagaaagatgtcattggactactaaaaaaggccctttttcacaatgtttgatgctacaaactgaggagttatgggcattttataatga

SEQ ID NO: 1221 - DNA, 200 bp, Lawsonia intracellularis
aaaagaaaaagaaagagaaaaaatagaagcagaaaaaaaagaaaatcttaagaaatataagcaggaaaaagcagccaagcaaagttacttggggtggctatttggatggaaaaaagcagcgtctgaatcagaaaaagagaaaagttctagtgaggactttaaaacatcttcagatagtgaactagagataaaagaggttg

SEQ ID NO: 1222 - DNA, 200 bp, Lawsonia intracellularis
ttagtctttctgataaagaacattcagagtttgatcatagtgataattatgaatacgataagagtaagcctaaatgttatataagtacaaaagaaagaaataaaagacataagaagagtctacaaagagatagtaggcttactgctgggttatcattaggtgctccaagacaaattatgtaccaggacaaaaaagatgaa

SEQ ID NO: 1223 - DNA, 200 bp, Lawsonia intracellularis
aaatcagatgatgataaaaaggtatctcaaggtaacgaatctcctcaagtaacaaaagaatctacagtagatggtaaaaaagaagtatctgcgtttgaagagaaccttaaatcagatgaaggtctatctgtaggcgatataacatttgagctttcagtattaagtggtgcaacaggaggagatgaagaccctcttggtaa

SEQ ID NO: 1224 - DNA, 200 bp, Lawsonia intracellularis
agataaaggtagtcatgagcaggagaaggaacagaagaaggatcaaaagaaatggtctgataagaaaaaaaagaaatggttaacgtttaaagctgaccaaaagaaatgtccaattttaactaaagaaaaatattggtctatttgttgtgataacttgttagaattacataatcgtcatgaaaaggaatataaagaagcag

SEQ ID NO: 1225 - DNA, 200 bp, Lawsonia intracellularis
agaaaaacgcatctaatatagagttattattagagaagcagtctcaagagcaagaatgtcttcgttctgaactcgaagagttatggaagcaaacaagagaagcacaggcctcttctagtagtgaaagtagtgggagtatagtttcatcagatatacgttcaagaggtgggtatgatatagaatctgatgtagatcaagaa

SEQ ID NO: 1226 - DNA, 200 bp, Lawsonia intracellularis
acaagcaataagagagctagagataaacaaataagtaaacttcaaaagaagcaacaaagggaaagaaaaacattattggcaatgcagaggacaaaacaagagcaattggatgaaattcaggaggaaagaagaaggaaagctaagaggttagggatgtctcttgtagagttaaacctaatgcagcaagaacagaaagaaat

SEQ ID NO: 1227 - DNA, 200 bp, Lawsonia intracellularis
gttgcataaccagcaacaacagcaagttaatagattggtagaaagacaacgtcagcaaatgaatgaactgttagcttcattacatcagccaactatgtctgaaagtactatgtatacaagttgttatagtggaatttttggatatttatttggttggggttcacaaaaagtttctagtgggaaagaggaaaatgatgttg

SEQ ID NO: 1228 - DNA, 200 bp, Lawsonia intracellularis
aacaaactccagaaaaaatcactgaagagaaggtgaaagctgttgctgggattggaactttaggaagtgatgcagagttagaagaaggtatattttctgatggagcggatttcagtagtactattcttcaagttatgtctgattcagagttgagtaatgatatagaacaagtaacagagcaggtagaatataaaggtgta

SEQ ID NO: 1229 - DNA, 200 bp, Lawsonia intracellularis
gtaagtagaggttctgaatgtgatgagataggagagcccatggatgaaagtcatgttcctgaaaagattatgcgactttttgagcgggcaacatttgtagataaagatagttctagtggaaaggaaggagatttttcttcagaagaaagaaaatctagttcttacagaaatcgttattacggagttgaaaaacgaagaaa

SEQ ID NO: 1230 - DNA, 200 bp, Lawsonia intracellularis
actacggaagatacatttaaaggagaaggcacaattagagaaacaattaaaagaaccagaagaaaagataagattacaattagaacaaagacagcaagagcggcgtagaaaaaatcttatgtttggttatcatatcagtgaagattttttagataaactggaggaagatgaatataaaacatcatttgaaccatttaata

SEQ ID NO: 1231 - DNA, 200 bp, Lawsonia intracellularis
agttacgtgcagagttggagcagaagcaagcacaagaaaggttgtctcttcaagctgcattaaaaaaagagtttgaggagagctgtcaacaagacagcgaagatatttctgatccagaggttaaacagaaaaagaaagaagagcgagatcttcttgtagcacttattgaagaagccgcaggtgatatacaagatgtagaa

SEQ ID NO: 1232 - DNA, 200 bp, Lawsonia intracellularis
gaatcagaggaagaatacattattgaatggaaaaagaatgaaagagcaagacgtgctgccttattagcttctgcaagagagtctggaaaacctttatgctttcaatttacagcacaatcttcttctgcaaatgcagcctcatcaatgcatggtagtcaccctgaaacacaagagggacagtctagtgataaagctagtgc

SEQ ID NO: 1233 - DNA, 200 bp, Lawsonia intracellularis
cacaacagttgaaccttctaatataacttgtccaggagacactacttctacagcccttactaaagaaacatcatcagttctgctacaatcgtcttcttcaagcatagtaacatcacaagatccagaagaaatacaacatactgatgaaaataaacaagatacatctctttttgatggtgagaataggaaaaaagagcaag

SEQ ID NO: 1234 - DNA, 200 bp, Lawsonia intracellularis
agaaggatagtacacctctaggcactggagtgagtggtggatatcatgatgcctcagatcattatgggcaagggagagctggtgaaggcggaggaggaaataatgatcctccagtcccctctgattctacacagccttcttcatctacatcttctactggcgttcaaacatgccaatcttcattgatagaaaatgctcag

SEQ ID NO: 1235 - DNA, 200 bp, Lawsonia intracellularis
gacagtagtcttcaatcttcattgttaggatatctattaccatccagtataactgataaaaatatctccactaaaaagagtacgcttaaaacagaaggcgtagatcaatcagttagctcaagtcgttgtcctgaggctctaactgcaagtgtaacttctttattttctagttcatatttgaaagttttatttagtggctg

SEQ ID NO: 1236 - DNA, 200 bp, Lawsonia intracellularis
gggggtaacaaacgttgaagccgctgtaacttctgatcctaatgaatccaaaaataaaaattctaaggatatagatattctcggagagaatagtggaaatacatcaatagaaggaaatcaagattctctaagtgattcagatggatctggtcaaagtcctagtggtgctacagggggaggttcaggtgaaagtcttggag

SEQ ID NO: 1237 - DNA, 200 bp, Lawsonia intracellularis
agccagatgatgataaggataaaaaggagtcatctggacataaaaagaaaaaaaagaagaaacataaaagaaaaaagaaagaacaggggactagtactgaaactcagacacaagagcaacaaaataaagaaagtcaaacaagttcgtctcatcaatgtgaacaaataacatctgaagatagtcaagaggaaaaggaacca

SEQ ID NO: 1238 - DNA, 200 bp, Lawsonia intracellularis
ctagtcaagaaaggaggccaagatggtaaacatgacaaagataataatacagtaagtgatagtgaagaaggtgcttggaaacatcatacaataattgtcaaaggagatagaaagcctgaaggcaattatgctccacctccatggcttacacatcctttaagtttattgactggctcgccagtattagaagggattccatt

SEQ ID NO: 1239 - DNA, 200 bp, Lawsonia intracellularis
gtctcttgaagatgagcttgaatgtggatttgctattgatgctatgaaacttttggatgaagggttggaagaatctgccagtagttcagatatttttttagaaggtgtaatagagggagcaataggaagttctaaaaaggctcaacatatatctaaccagtatagcatattgaaacagagacaatctgaagccgttaaag

SEQ ID NO: 1240 - DNA, 200 bp, Lawsonia intracellularis
ctctgggaagaaaacataaacagcagctagaagagttaagagaaagtcagttacagaaaaagaataaaacacttagaaaaaatattaaggattacaaaaagaaaaagaaagagttacaacaaaaatttcaagaagaaatggaaaatgctgaccaagaaacaaaagagaagttagaaactatctgtaaagaggaggtaaac

SEQ ID NO: 1241 - DNA, 200 bp, Lawsonia intracellularis
aaactttaccttacatgtaaggaagacagtgaggctcaagcttgtagcctttaccgtaaagatggagatcaagtagaagtgcttattcttcaacagaaggaagaatatgaaaagttgttacaacaacagaaagaagaaagaaaacaatatagaggaaataaacgagcattattacagtctatctcttcaaccatagggtt

SEQ ID NO: 1242 - DNA, 200 bp, Lawsonia intracellularis
acaacaagcagttgtccaacaacatgagggtacagcagcagtaccacaagatacatttgatagtcaaagccaaggaactacaaatagtagctggatgtttcttagattagatttctctgataacggagaaggaacagataatatgttcccatttgatccattaccaagggaggtacaaggagcatcctttacagatgcta

SEQ ID NO: 1243 - DNA, 200 bp, Lawsonia intracellularis
caagtgaagaccaagatgttgatgaaatagcccaagaagctgatgaagatttagatagtaatggcaacagtagtgaaagtggtgatctgtttgatttctcagatggtgattatgaagatgataaagatgatgatttgataccaagttggtttcctctccatgatgtaggaatatcttatggtgatgcaaaagggaaaggg

SEQ ID NO: 1244 - DNA, 200 bp, Lawsonia intracellularis
gaagaagaggtaataggacaaccaagtagcactacagatattattacaggtgctataggaggtgcagatgtagttagtgttatagcaagttctactgcaagttgtggaggaggagaagaagaggtagtagttaaatccaaagaaaaagagaagaagaaaaaaaggaaaaaaaggaaaaaaagaactactgaagaatatga

SEQ ID NO: 1245 - DNA, 200 bp, Lawsonia intracellularis
tgcatttgtagaaaaacaaaggcagtatatagaggattgtaaaagaaaatacaatgcagcttatgagtgtttaaaagcaatttgtaaagaagagcataacaatgcaacatcattagaggaacaacaggaactagcaaaacaacatgaaagaaaatttggggcactttctcatatgggaatggctcaacatttatttttgc

SEQ ID NO: 1246 - DNA, 200 bp, Lawsonia intracellularis
aagaaaaacttgggaaaaagaaaaaacgttggttaaaaggagaggatgtttcatctgaagaagaatgttcactttggtgtaattttgtgtttgaaccacgtggagatgattcagatacaatatcttcagaagatgaaaccaatgtagcagttgaagtaatcgttgatgctggtacaaacactgaaactgatactaaagga

SEQ ID NO: 1247 - DNA, 200 bp, Lawsonia intracellularis
caacctaaagaggtcagaacaggaggagagaatgatcctttagaaggtgaatctagcggtacagtgtcttctaaaagtaaagagctgcaagaaaagcatgagtgtgagatacagtgtttttgggaagaatataaagaacaactagttacattgcatgataatcaagaacaacgtcttcaaaagtggataaatgatggtaa

SEQ ID NO: 1248 - DNA, 200 bp, Lawsonia intracellularis
gccagagcatgatttaaaaaatacttttggagaagaagaagcagcattacatcaaacacaaggatgttttttaaaaagtttacaagaaaagcataaaagagaagaggaagaagagcgtagacaaaaaggacaagaggatagtggaactagtttagagcagcctacaagcaaatctaaaagtaaggttttgcaagaaaagc

SEQ ID NO: 1249 - DNA, 200 bp, Lawsonia intracellularis
atgcaagtgagatgcagtgtttttgggtaggatataaagaaaagttaactattttacgagaaaagcaaaaacagcatcatcaagagtgggtagagagtggtaaaccagaagatgagttaaaggatacttttgaaaaggaagaagaagcattacatcaaatgcaaaaatgtcttttagcaagtatacaagaaaagcacaaa

SEQ ID NO: 1250 - DNA, 200 bp, Lawsonia intracellularis
agagaagaggaagaggaacgtaaacaaaaagaacaaaaagataaggatagtgagtctagtataatacaaggcccattagaagagcagaatgaagaaacaccagcctctagggactctataacatctagccaaggagatactcctcatagggaaaacacttcattagtgacttttaaagagttaggtgttgaatcaggtga

SEQ ID NO: 1251 - DNA, 200 bp, Lawsonia intracellularis
agaagagataaacaaagaagataaaaaagattcatctgaagaacagacaagtgaatctaaaagttctaatggattattgcaaaaagtaatatcctttttccagtctgtcggaagtagcttcaataaagaagaaggagctgttgggggaattgttacagagagttgttatgtaaaaagtaaagaacttcaagaaaagcatg

SEQ ID NO: 1252 - DNA, 200 bp, Lawsonia intracellularis
aaagtgaaatagaatgtttttggggtgaatatggtatacagtgtagattattacgagatttccaagatgctcaacgccaaagtaaaggcttaagaaatactgctgaagcattggaaaatcaattagataaagaacgtgaggattttcgtaaaaagaagaaaaaagaatggcagaatttacaagaaaaacataagcaagaa

SEQ ID NO: 1253 - DNA, 200 bp, Lawsonia intracellularis
gaggaagaagaaagaagacggcaggaagaaggacaaccttcaaaagggggtatatcaggagcaaaagaaaaagagagtgatgagttaggagatgagacagacggagaaaaagttttttcacttactttttttggtcctcccacacaatttgatgataataatgccccaccacctttcccatatgatcctcctcaagattc

SEQ ID NO: 1254 - DNA, 200 bp, Lawsonia intracellularis
cccacaaaatggagaggattctagcgagattaatccaaatccagaaggttcttctcagcaggaatctccctccgaaagttcaacagaagatacatcttcatcatctgaagatgaagacatagttacattgctttcaggtaatataaagcaagctcgtcctatagggcaatcaacaataacaacaactactactcttgtta

SEQ ID NO: 1255 - DNA, 200 bp, Lawsonia intracellularis
cttctgtagaaggagctgaaggattatttccaattgaagaagagacagaacaaaatttagaggatgtacagggttcaggcgctactcaaggaatggtaggattatctacgattgaagaagaagtggaggaggctcctggagcttctgaagatttagactctaatcaaggagcaacaggagaggtctcatctccaggaagt

SEQ ID NO: 1256 - DNA, 200 bp, Lawsonia intracellularis
aaagaggaagttgtttatttatcatcaagtggagaaagagcaatacataaatggcttgaatccagtatatctatgccagtgactatggaagaagggtcgttatcacaaggtggaggaaaaactagtactctttattctctaatggtttcatctggcattctatcttttggtggtgacggtaatggagaaaaggctagttc

SEQ ID NO: 1257 - DNA, 200 bp, Lawsonia intracellularis
ttcaaataaacaaagtaaaagatctccagaggaatgtaaggcttttgaagaaaaacaagttcaacaacggcataatttattacagagtattgaagagaaaaagaaagaattacttttaacctttgagaaacaatgtcctcctgggcttccttcatataaaaaagacaagttagtaaaagaacaaaaagtaacaatggagg

SEQ ID NO: 1258 - DNA, 200 bp, Lawsonia intracellularis
atttcctctgtgtaagttgttaccaatatgaaacattagaacaaaagcaaaacgagcaaagaagacgttgggaagaaggtgaggacgttgctgaagaagaagatcttattttgttatgggacacactagataatgaggcagaagaagggactaaagaagagcatgcagaggttaaagtagagggagtagaaggagaagtt

SEQ ID NO: 1259 - DNA, 200 bp, Lawsonia intracellularis
tttgatggaatatctgaagaagataagccaaaaaaggatgataaagaagaacaggaacaaaaagcaacattaggagattcatctggtgaaaccatagaagaaagtcaacagccgcagcaagaagaagaagaaaaaaaagaaaatagtcctagtgggtctaatgaaagtccttcaccacagcaggaagaagaaagtgtaga

SEQ ID NO: 1260 - DNA, 200 bp, Lawsonia intracellularis
tgaaacttctagtgttgttacttcttcaccattgttatctataaatgaagttaagcaaacagaagacaaaagtgcaaagaagaagagatcagaaaaagagcttgatgattttaacagaaaacaagctgaacagaaggattgttttttaggacaggttcagcaagcaaaaaatgaattagaagaaaagtatggcgaagctt

SEQ ID NO: 1261 - DNA, 200 bp, Lawsonia intracellularis
gttgttctgcttcattggatgaactgctagaactagaaaaaaaatttataaagcaaaatcagaaattagattctactagtgaagcccagtttaagaagttggaacgtcgtcaagaagacaagagaaatagatgggaagaaggtgaagatgtttcttcagatgaagagatatgtttcatatggtcttcagatgagtcatat

SEQ ID NO: 1262 - DNA, 200 bp, Lawsonia intracellularis
gagaaaagtgatagacttcatgaaaagcatactcaagaactagctgacttttggcgtaattataagaaaaaattgtcgacactaaaagagattcagcaagaacgtcgtgatcagagcagtgaggatagcaaagagaaacaagcaatggaagagatgtttcttgcagaacaagaagctatgtataaaagccagatgaacac

SEQ ID NO: 1263 - DNA, 200 bp, Lawsonia intracellularis
ttttgctgagttaaaacaacaacaaaagaaagaagaggaactagaagagttaggttggacattggaaaatatgcaaggagctgttggaggtgtagagccagaggatgaagataaaattgaatctcctcttgatagaaaacatcaacaagaaaggaagagtttttgggaaaaatgtagggttgatagtaagtttattgaac

SEQ ID NO: 1264 - DNA, 200 bp, Lawsonia intracellularis
aagaacaaagtgaaagacgagatcggtggagaaaacaggggaaaccaatagcctcattagaagagatttttattgaggagcaacaagcagtttttgaaacaaaaatgcttttttgggaatcattgcaagagcgacaaaagaaagaaagagaagagaaagaaaggagagaagaacagaaaaggatagcagaattagaaaaa

SEQ ID NO: 1265 - DNA, 200 bp, Lawsonia intracellularis
cagttatctccattttggaaggcttttaaagatgatcaagctcgaatgagagaaaatcatgatatgcgtcgtaaagaatgggaagaatctggaaaatctctagtagtgttagagcaactattggctgaagaagaagaaatattttttcaagataagatgcagatgttagaggagttagaaagaaaaaaatactttgaaga

SEQ ID NO: 1266 - DNA, 200 bp, Lawsonia intracellularis
aaaacaaagctcaaggcaaaaagaacggcaaggtaggttttctacaaaagatgatagtgatgaagacgaagatgatataaggtatcatacagtatttgtccaaggggagggagaacccccagggaatgaggcaccaccacctctcccatttccccctcctgttttaggtgatagtggtgaaatgcaaagtggggatactg

SEQ ID NO: 1267 - DNA, 200 bp, Lawsonia intracellularis
gtggtgcaggtcctccttctgaagagctttctcttgggaatattttgtcgtcttcagatgaagatgataatatcatagtctcttctactgaaagtagtagcagtagtagtagtagtagtgatgaatcagatgtatctagttttgaaacatcttcagatgaaggtccagattgtgttgatggtgtctatggtgctgtcgga

SEQ ID NO: 1268 - DNA, 200 bp, Lawsonia intracellularis
ggtgaagaacctgagaaaaagaaaggcaacggctatcataagaaaaaatttaagaaggttaagaaaaaactccataacgttgcattaaatcaaaagcttaagaagctaaaagataagttgcaacaacttgaaaaggagtaccataaatcaattgcagactgtcaaaacaggtatcaagacgttaagtgtaacctattgat

SEQ ID NO: 1269 - DNA, 200 bp, Lawsonia intracellularis
ggctcaagcagaagaattgattggtaaatctagagaagagcaagatactctttgtaaaaagaatagtgagaaaataaaaaaaattgaagatggatatcgtcgtcaatatgaacaattaacagaaagttattacacaaagaaacaggtagtattgaataagttgtctgcagtgatggaaaagaaggcactgcttaagcaaa

SEQ ID NO: 1270 - DNA, 200 bp, Lawsonia intracellularis
agatacaagaatatgattctgttgacggtaaacatagagtttctaaagggtataagaaaaaagctagtaagttaaaaaaagagagtaaaaagttagaaaaagagttggaagcacttaaggagcaacaaactaaagaattacaagattttgatcagaagagtgacgcatgtagacagcaaattttattttttcaaaaagaa

SEQ ID NO: 1271 - DNA, 200 bp, Lawsonia intracellularis
gaagtgaacagtataaaagatgcaggaggagacctttgtgctcttcaaaacaagcatacagaagaggactgtaaagttgaagagttgtttactagtcaaaaggaattattaatcaaagaacatgaatcccagagaaatgagaaagaaaaaagaaagaaagagttagagaaacaacaacaagctactagagaaaaggatac

SEQ ID NO: 1272 - DNA, 200 bp, Lawsonia intracellularis
ccctacatgttatgagcatggcatagataatatagttaagcttttagaggaagagatcgaaagtttagaaaaagagttggaagaacttgaggaaaaacaagaggaagagtggaaagcatttgagttacaaactgaagcttgtagaaagcaagtcctatttttgcaaaaagctaaacccaaagatagtgccagagaaggtg

SEQ ID NO: 1273 - DNA, 200 bp, Lawsonia intracellularis
gggaagaagatcgcagagcctttgaaagtatggttgctagtcagcaggaattgttacttaaagaacaagaaagacagagaacagaaaagttaattagattaacagaggcaaaggaaaaaagaaaacagcataaaaagaaacagcaacagaagcaagaagaaaaagaaagagaaaagcagaaaaagaaacaggagcaagta

SEQ ID NO: 1274 - DNA, 200 bp, Lawsonia intracellularis
aaaagggaaaaagaaagagaattagagagacaaaaacagcagcttaaaaaagaacatgtacaagatagaaaatgttttgttacaacttttaatttttgtaaagaacaactgcaaaggttacatcaagaaaaccttaaagttgtgcatgaaaagggtagcgatgatacatccttgatgcaggaatatgaaaaagaaaaaga

SEQ ID NO: 1275 - DNA, 200 bp, Lawsonia intracellularis
gtgttttttaacagctcaaaaaagtcagtatgaaaagttgttacatcaacaacgtcaagagatgaagaccttaattcaaggttcacatggagctgatgtttcttcttctcaaaaagaacatgaaaaaagccatgctaagacattagaaaaacttctgcaaagacaagaatcatgtcttaaacaattagaagatgcacaaa

SEQ ID NO: 1276 - DNA, 200 bp, Lawsonia intracellularis
aacaagaacgtcaagaagcagaaaaattaggtaaagatctttcaaaactagatgaaaagcatagaaaagagaaagaagacttttttgaccatcataaaggaatattagaacaatgtttactccaaaatttatctgagactgtttgtcttttaggtagagatgaaagttctagtgatgaaggctcgtttgatcttgaaggt

SEQ ID NO: 1277 - DNA, 200 bp, Lawsonia intracellularis
ttttattctccagatagatgtatgggacgagtaggtgaacccatatttacatttgttggaagtgattttgttagatcccaagaagcttctggtatttatccattggaacaacaagtagaagcatttgatgaagtagatactggtcgaaaaaaagaagaagatagctatacagataaagagaagaaaaaaaagaaaaagag

SEQ ID NO: 1278 - DNA, 200 bp, Lawsonia intracellularis
taaaaaagaacgtaagttagagagtgaactagaaaaattaaaaaaagagcaagcaaaagcaaaaagtgagtttgaagttaaagtaacttcttgtagagaagaacttttcaaatcacagcgagatgagtttgttactgcagagaataaaaaacaagatttaaaagcattagaaaagaagcatgaggatgaaaatgtacagt

SEQ ID NO: 1279 - DNA, 200 bp, Lawsonia intracellularis
ttacatcaatgtgtgaagagcagtttcagattttgtgtaagaatcaagaagaagaaaaagtaagaaaagagcaagaattacaaaaagcaaaggaagatcataagaaaaagaaagaaaagaaaaaggagaagaaagaaaagaagaaagaaaaagaaataagtaagctacagcaacaacacattaaagctagagagcaattt

SEQ ID NO: 1280 - DNA, 200 bp, Lawsonia intracellularis
ttacagagttataaaaattgtaaagaaaagatggagatgttggatcaggaagaacttttaatagtagaagcctctggaggtgatgttgaagcaaaggtaaaagagctacaagcacaagcagaaattttcttcaaaattcaaaaagatcagtataagcttttattccatcgtcaagaacaagaaatgaaggctcttgaagc

SEQ ID NO: 1281 - DNA, 200 bp, Lawsonia intracellularis
aagtttttatggtgatgaagttgatgctcctactggcgctcgatctatagaagaatttcttgtagatcgaatgttaaaacctcaattatctgaagatagtgaggaagaacttaaacctcttgaagacccttcaactttttataatccatctaagtatggagagggtagttttatattctttacacaattatcttctgagc

SEQ ID NO: 1282 - DNA, 200 bp, Lawsonia intracellularis
aaactagagatcaatatggctcagatgatgaaaatggatttcggtatcatacagtaattgttcaaggagagggggaacctaaaggggatgaggcaccaccgcctttcccattttattcttttgtttcaggcgatagtggtgaaatgcaaagtggggatactggtggtgcaggccctccttctgaagagctttctttaggg

SEQ ID NO: 1283 - DNA, 200 bp, Lawsonia intracellularis
aatacttcctcttcttcagacgatgatatcataacttcttctattgaaagtagtagtagtagtagtagtagtggtgatgaagcagatgtatccagttttgaaacatctttagatgaagggtcagattgtgttgatggtgtctatggtgctgttggaggtgaagaacctgagaaaaagaaaggcaaagcagttgatgatgt

SEQ ID NO: 1284 - DNA, 200 bp, Lawsonia intracellularis
agatggtggtcgaaaaaaagaagaagatagttatacagataaagagaagaaaaaaaagaaaaagagtaaaaaagaacgtaagttagagagtgaactagaaaaattaaaaaaagagcaagcaaaagcaagaagtgagtttgaagttaaagtaactttttgtaaagaagaactttttaaatcacagcgagatgagtttgtta

SEQ ID NO: 1285 - DNA, 200 bp, Lawsonia intracellularis
ctgcagagaataaaaaacaagatttaaaagcattagaaaagaaacatgaggatgaaaatgcacaatttacatcaatgtgtgaagagcagtttcagattttgtgtaagaatcaagaagaagaaaaagtaagaaaagagcaagaattacaaaaagcaaaggaagatcataagaaaaagaaagaaaagaaaaaggagaagaaa

SEQ ID NO: 1286 - DNA, 200 bp, Lawsonia intracellularis
gaaaagaagaaagaaaaagaaataagtaagctacagcaacaacacattaaagctagagagcaatttttacagagttataaaaattgtaaagaaaagatggagatgttggatcaggaagaacttttaatagtagaagcctctggaggtgatgttgaagcaaaggtaaaagagctacaagcacaagcagaaattttcttcaa

SEQ ID NO: 1287 - DNA, 200 bp, Lawsonia intracellularis
aattcaaaaagatcagtataagcttttattccatcgtcaagaacaagaaatgaaggctcttgaagcaagtttttatggtgatgaagttgatgctccttctggtgctcgatctatagatgaagtcctttcatctgaagatagtgaggaagaacctaaacctcttgaagacccttcaactttttataatccatttaagtatg

SEQ ID NO: 1288 - DNA, 200 bp, Lawsonia intracellularis
gagagggtagttttatattctttacacaatcatcttctgagcaaaccagagatcaatatggttcagatgatgaaaatggatttcggtatcatacagtaattgttcaaggagagggggaacctaaaggggatgaagcgccaccaccaccagtgaagcttcgagtaccaccttctctaactgctgacttggaagacgttgga

SEQ ID NO: 1289 - DNA, 200 bp, Lawsonia intracellularis
gatggtaatactgaggttgactctagatgttttaatcagggtgtaactagctcagggatcagtagtagtcgtagtagttttactactgaggaaggatctcaaggtagtggcagtatgtcatcactagttcggcttcaagtatcatcttctctaattactgacttagaagacactgaaaatggtaataccaagacaggtac

SEQ ID NO: 1290 - DNA, 200 bp, Lawsonia intracellularis
acagcaatggttaggcaatacaggtaacgataatagttgtaatgagagtactcaatacacagataattcaagtcatcatagtagtgatgatgatggaacagatggtcatagtaatgataatattaatggagctgagggcggctcaggagctgcaggaggttcaggaggggcagaaggaggttcaggagggtcagatgatg

SEQ ID NO: 1291 - DNA, 200 bp, Lawsonia intracellularis
ataacaatcctccagatgataatagttctaacgaagaagaagaagaagagagcattcttcttgtaagtgaaactgacttaacagatacaaaagcagaagacggggatagtgaaggagaaggaggtataaaagatcagagaaagaagaggaaacataaaaaagttagtaaaaggaagcaaagacagcatgaaagacaactt

SEQ ID NO: 1292 - DNA, 200 bp, Lawsonia intracellularis
ttagagaaaaaaagtcttgcacatagtcaatggaatgaaaagaaaaagcaacaggagaaacaaagaaatagagcgttattgtttagtattcaaagaaaagaggatctttcagaacaaataagaaaggaagaacgagaacagcaagagtttgaatctaatcaacatcatgaaaggatattgttagaagcaaagcataaacg

SEQ ID NO: 1293 - DNA, 200 bp, Lawsonia intracellularis
acaaaatgctgagcattctacagactctgatggagaagtccatttcccatctaaaagacccaaaaagtctcataagaaaaagagtcaacaagtaggcaagcaatcttctcaggtggaacaacaagtagagaaaaaagatagtaaaaaacagagggaagaaaaggatgttccatcatgtttgttaactgatatttcttata

SEQ ID NO: 1294 - DNA, 200 bp, Lawsonia intracellularis
agcgtttattaagtagttctcagcaggaggaaaagatacattgtgtaactagtcaacaaaaagagaaagaagagcttcagaaaaaacaagagaaagaaaaagaagaatataaaaaagaagcagcaaaggtacagaaatgtcttgctaaattgagttctcaacaacaaccaggtgcaagtagacaacaaaaacaagaggaa

SEQ ID NO: 1295 - DNA, 200 bp, Lawsonia intracellularis
gaagaaattcttcagcagcaaacgaaagaaggcaaccagtatattttaaaaagcaaggtaaagctaaataacaaacagcttgcagagaaagataagcttatacgaaaacatcaagaagagaatcttaaactgtctaagaagcatcgcaaagaaaaaacagaaaaagaaaagaagagaaagaaaaaggaagaaattaaaaa

SEQ ID NO: 1296 - DNA, 200 bp, Lawsonia intracellularis
gaaaaaacatacaataacaccagaagaaaaggaacttcaagaatattgttctgggcgtagaagaactttatattccatgcaaatagacgagagagaccttttagaggagaaacataaaagagagttaggtcaaattctcgatatggaagaggttgaggttttagaagagcagcatgaagaagaagtaaaagagctattcg

SEQ ID NO: 1297 - DNA, 200 bp, Lawsonia intracellularis
agaaacaaagtaaggatagagggttgcttgaagagcaaataaaaatattacttcaacagcaatcctcccatactacaagtggggatgagaaaaaagaatgtgtagaatcatcagatgagtttgatagtatcccttctagctccacttattatgattctacaagctcttcttatagtactggtgatttttatagttctatg

SEQ ID NO: 1298 - DNA, 200 bp, Lawsonia intracellularis
ccttcaggtgagcctgaagtggaaataggtattgaaatagatgaaaattttggcgtaggcactagtgaaaatagtaataatacacaagatgaaacacatcgtcctattggtggtgcacgaaaatatcagcctaaagaatataaagatgtatctgatacatcaaaaaaacagaaaaaacttactagaagcactccaaaatt

SEQ ID NO: 1299 - DNA, 200 bp, Lawsonia intracellularis
aatgcttctttcaaaaaaagaaaaagaagcattgagtcataatgtaacacaaagctatcacaatatatataagaagatacgaaagaaagagatagaacttgaagatgtattacgaacagagcaggaaaaagatagaagaggagaggatgctgattatcagttaattcttcttttaaaagacgaattacaacatctattga

SEQ ID NO: 1300 - DNA, 200 bp, Lawsonia intracellularis
gtctatttgaacagacccttgaagaagaacgtcaggcattagcagcagttgatgcaatggatgaacagacagaacttgaacaacaatcaatagaagagtcagaaaataagaaaaaagaagaacctaggaggaaatcaagtctattagaacgtatctttaaaaggaagcaggaaggagatgaaccatctaaaaaaggaaaa

SEQ ID NO: 1301 - DNA, 200 bp, Lawsonia intracellularis
gaaaatcatcatgaaaatcaaaaaaggctagaggaagaaccattagtaggattaaagaagaggcctaaaagaacatcaacaacaagtaggcttagcttaacattaacctctataggagagagcaagatcccacagtgtgaaaaaagtgatgaatctaatcttgtgggccctgttgtttcattttttaagaaggagttacg

SEQ ID NO: 1302 - DNA, 200 bp, Lawsonia intracellularis
aacgcgtaaaagttctatgatacatggtgtttgttttcctcaaacaggaggagttcttcaatcactagatgttaatagccaaaagaatttagttagtagagatgatagtaaaaaacttgaatccagtggtgctccaggtggaggtgatggatcaggagatgatagtcattttaaaaaagataaaggatctaaaagagatg

SEQ ID NO: 1303 - DNA, 200 bp, Lawsonia intracellularis
gtagttctgattctaaaaagaaaaagaagaagcatagccacaaaagattctgtagaaaacgtttagctcatgaacgaaataaacttaggaggaaacatcaagaagaaaaagagttatataaagagcagtttacacgtggggttcaacaagtatttgctctccaggacaaagagcgtgcagaagtagcaaaaaaaggaggt

SEQ ID NO: 1304 - DNA, 200 bp, Lawsonia intracellularis
gaccttgaagcattagcagaaagacacatgcaagatgaagaagagcattatgtaagaaatagaagagaggtagcagaccttcatgataaacaaaataaagaacggtgtagactataccttatatctaaaggtggaggagaatctgcaaatactacagtgacaagtgatgaaagttctgtatcagaaattttagaaagtgg

SEQ ID NO: 1305 - DNA, 200 bp, Lawsonia intracellularis
cagtgaagctgccgtatataaagaaccagtaactcaagaagttgaagaactgagaagacaacaacgtaaagagttggcagtgcttatgttctgttgtgaggatgaaaagactgctttacagacaatgcatgagaaaaataaagaatcgttagttggtacaatcttgttggaaacattagaaaaagttcataaacaagaag

SEQ ID NO: 1306 - DNA, 200 bp, Lawsonia intracellularis
aagacgatcttgctgcagaacatcaaaagaaaaaagaggaactattaaaaaagcataaacaagaacaaaaagatcttgaaaataaacataaacgttcttcaagcaaacgtggtcctaagagaaaattacatcctaaagttaaagccgttcttttagaacacaaacaagcaaaaaatcgccaaaaaattattcatcaaaac

SEQ ID NO: 1307 - DNA, 200 bp, Lawsonia intracellularis
cgtaaaactcatttggagaaaaaacaagaagaagaaaaaaggatgatatctcaagggcaagttccttctgtacttttaaagaaagtcagtgagtaccatggagggcaagaaggtacatctttagtagaacttgtagcattatatcatgaaggagaaatgagtgccctattagatgaacaaaaaagacagagagaagaaag

SEQ ID NO: 1308 - DNA, 200 bp, Lawsonia intracellularis
ggaaaaaagacaacgtcaagatttaatcagagctaaagtaggggctttttttactcaacggactccttcagtcagaaaaaaagagggtctatctttaagccaatcttcactacatgattcttcaccccaaaaatatacacatccaagccataaaacatgtggtcgacttgctgctgaacaagctatagaaaaaggtttct

SEQ ID NO: 1309 - DNA, 200 bp, Lawsonia intracellularis
ttgagaatcataaggcaaattgtagctttatattgggaatagagcaaaagaaagagcttaaacaattagaagaagagtgcgaaaaagagcttaaacaattagaagaagaatgtgatgcagcatatgcaatatttcttcaacaattaccattcctttgtgatgaagatagacaaacacaagagcagcacttcgtatcccaa

SEQ ID NO: 1310 - DNA, 200 bp, Lawsonia intracellularis
cgtcagcagatagaaaagtatagggaacaacaaaaagaacaattaacctgtttacaacacaaacatcaacaagaagcaaaagaacttgagaaattattagaagttcaggcaaaagaactggaaaaaaggcagaaagaagaaagacaaaaacaacgagatgttgtttcttcatatccagagagaaaagctcagcaagagcg

SEQ ID NO: 1311 - DNA, 200 bp, Lawsonia intracellularis
attaataactcagtctaaacacctgacggctcttaaagaagcattaagtgaagaagattctatctttcaaaaagacctcacttcttcaacaatcgtaaaacagcaattgtcaaaggttgaacaacagaaagaacttgaagctttgcaagaagattttgtgttagatctttgttttactgagtcagattatacaagtgttt

SEQ ID NO: 1312 - DNA, 200 bp, Lawsonia intracellularis
cagaagagagttcagaagaatcttctgtaccagaaggtattagtagaaaacctcatggacctagtggaggtggattcagacatcctaggagagagataagtagtagtgattcagatacagagggcaagtcagatgatcaatctgttagaaggatagaacaagaaatacaaacagaacagacaggtccacaaggtacagaa

SEQ ID NO: 1313 - DNA, 200 bp, Lawsonia intracellularis
gaaagtcaaacatatgctgtgcaacagaagacaagccaatttgtagaagtgaaagaagaggaaattcaggttctagaagaaaaagtacaaattgtagaagagagaggagacagtgataaagagaaagtcttaacaagagaagagaagaagaggaaaaaagaggaagtacaaaggaagcatgagaaagaacttaatctgtg

SEQ ID NO: 1314 - DNA, 200 bp, Lawsonia intracellularis
gatgtcacagtatgaaactacagtccaaaagatagagcaaaagtataaagaaaagaaagctaatcgccatattcttggatgtacattagaggagttacaagaacaggaagaaaaagaatctaaagtagctgttgggaactttactgtattattagagaaaatgagggaaaagcagcaaaaagaattacaacaattcccat

SEQ ID NO: 1315 - DNA, 200 bp, Lawsonia intracellularis
cctcagatgaagatgaaagcgatgtggatagaagaaagaagaaaaaagttataaaaacaaaagctgaacgaaatgcacaaagagagcaacgtaagcatcatcatactcctcatccttatcatccagaggagtcaacatctcatttagttttagatactaagcaaatagtaacactgacaccaagtagcagtgatcaagaa

SEQ ID NO: 1316 - DNA, 200 bp, Lawsonia intracellularis
acaccagttcaatcaaaagaaacagctacaaatgaaacacctattccatcactacctagtacggtaaaaggccttacactagaggaagttacagtaactgtattacctcaacctacacaattaagtagcctcttaagttatttttcttctgaaccattacaagaacaaccatgtcaggtagaggagcaacaagtctcatt

SEQ ID NO: 1317 - DNA, 200 bp, Lawsonia intracellularis
tgaaagttctcaagtacaagctagtactgatgaggcaacaatagatccagaagtacaattagttttggatgagtattcatcaaaagttgcttgtttacagcaagagatggataaaaaattacaagaaatagaagaaaaaggtacagatagttcagcttcatcagatactgaatggtcttggcctaaaaaagatatgccaa

SEQ ID NO: 1318 - DNA, 200 bp, Lawsonia intracellularis
gagaaataaaaacactcaaaggtagtgatagtgaaggaaaagatcagcaagaagtgccaaagattccttctgcaggtgcacattctttgagtagtatggctgaatctgaagatgtgggtgcagtttcacacatagagaaaaagaaaagaaagagacataaaaaacataaaaggagtcaaagggaaaaaatatctcgagca

SEQ ID NO: 1319 - DNA, 200 bp, Lawsonia intracellularis
aagagagctcttatggcacaatattttgcaaaagtaacactcttaggacaagaatgttcagagaaagtaagtgagattcaagaacaaaaaaagcagaaatgtgaaatagaagaaaagcagagaaaagagagagaagaattttttgatcaacatcaagcagcaagaaatgctcttttagctaaacaacaacaagaactcat

SEQ ID NO: 1320 - DNA, 200 bp, Lawsonia intracellularis
aggagtagcacctgaggaagttggaccattacaagataaacatcgtcaagaacaacaagcacaaagtcgacaatggggcttaaacttacatagtttaataaaacaacagaggaaagagagagggcttagttcttctatatctagttcatcatcagatgaagacataatagatgaaggcagtcaaagtgatgatcaagaag

SEQ ID NO: 1321 - DNA, 200 bp, Lawsonia intracellularis
atagcaaaagtctatcgtcacctatatctccaccaccttctcctcctgtatctggtgcagactcacaatgtataggaggagcatcttcttcagacactgatgctacaatgaagtctgatggtcataaatcgccagaagtcccagtatcatcagataaaaaagaagaaactggtggtaatcaatcaagtaaagttacaact

SEQ ID NO: 1322 - DNA, 200 bp, Lawsonia intracellularis
tatttactttctgtctttacaggtaaggggggaactgctgctggcgctcagtcttcttctagtgaacatactggtagtaaaagacaacaaccatctggttcagatcaaacatcgaaatcaagtagacaagggccttctactccttttgaagggcaagggacatctggagtagagggtgcttcagggggagcaggtgatcc

SEQ ID NO: 1323 - DNA, 200 bp, Lawsonia intracellularis
aggtgatggtgaggataaaaaatctaagaaactagatgatagtcatggtaaagatcaaaaaagttctctaaaaaaacataaagataaaaagaagcatacaacagaggaagaggaagctaaaaagaggttacaagaaaaagttgaacagaaaagaaaaaatagagaactattgaaacaaaaatgtaaagaagaagaagaag

SEQ ID NO: 1324 - DNA, 200 bp, Lawsonia intracellularis
cttttttaaggaatagagagaaatgtaaaaaacagtttcttcaagagcaagaagaggaatatgaggctgctagacagtcaggtaaagatttagaattgttgctagttgaacaacgtgagagacaagtagaattttataatcatcacgagagtcaacatgcaaagatgaagaaaaaacacgaggcgttacttaaaggaaag

SEQ ID NO: 1325 - DNA, 200 bp, Lawsonia intracellularis
cgtaagaagaaagtcaagaaatatggaacatcactagaagaacaacaagcaaaagaaagagcagaggctcgtcagaagtatcaaaaaggtatagaggtgatggaaaagaggcagcaggaagaattagatgaagcctctgctcagggtaagaacttagaagatattaagaagaaacatagacaagaggaagaagattttta

SEQ ID NO: 1326 - DNA, 200 bp, Lawsonia intracellularis
ccgtgaacagatgttaggtgaattaggaaacctgcttcaacgacaaaaccaagaaagacaaagtgtagggttacctccaattgaagggagctcaagtagtggtgtaacaacatattctgatacagaatatagttctcttgaaatggatcttgaaactaaagaagaggtttatacaagtggaaatgaaagtacagaacaag

SEQ ID NO: 1327 - DNA, 200 bp, Lawsonia intracellularis
aagtagtaacagaacaagaagtagtagtaacagaagcagaagaagtaacagaggaaaagttgttagtaaaagatgaaagcttttcttatcaaggtagtcttacagaatatctttctcaggcgatcccagaggaagtgaataaaccttgtatagatgatacaagtagcagtactagtactactggacggaaatctagtttt

SEQ ID NO: 1328 - DNA, 200 bp, Lawsonia intracellularis
tttgaaaagttcttttcaaaagttaaaggaagaaagcattcacaagaagaaactgaaagtaagtcaggcactggtagtacggcatcatatggttctaagtcttcaactacaatgcagaaagatgaagtacaacagcattctgataggaaattaaagcataaacagaagaaaaaaagaaaaaaagaaaaacaattggaaga

SEQ ID NO: 1329 - DNA, 200 bp, Lawsonia intracellularis
aaagcaccagcaacagcagcaagatgtttataaagactttaaaaaacgtcgtttattaatggagacaagacatcagaaggaacttgaagaagcaatctctaaaggtgaagacataacaaagttacaagaaaaacatcatgaagaagcttcagtacaacatcctcttttattttctcaggctatgagtgtattgagagaac

SEQ ID NO: 1330 - DNA, 200 bp, Lawsonia intracellularis
aacaaaaagttgaaagagaaaatcttatagtaagttcaggtgacagtgataccacctcagatacatcagatttagaggagacaggtgtgtcttctaaagatcactctccagagaagaaaggtggtaaagacggtaaacctgatcctgatggaggaagtacttccagtagtcaatatcaaggacttgtttattatgtaaca

SEQ ID NO: 1331 - DNA, 200 bp, Lawsonia intracellularis
gcagattcagcccctgtattcccatatggtagtgaggcatcattacctttctcttcagacaagggtaaaaatgaaggtaagcaacagacattacaatgtggtgatagcggatatgagagtgataaccaagaatctggggatggttctggaggtagtagtactgaaaatcaagtatgtgtgtcgcaagagtcaaatagttc

SEQ ID NO: 1332 - DNA, 200 bp, Lawsonia intracellularis
tttaggtggagggcctcattctgacgatggatatgaaagtagtgatgaaaataaaaatggaaaaggtagttcaggtcctcagtcagtatgttgtgtaaatggtgttggagcaacaggagctgctaacgggggtgggtcttctgtagcttcgggagttggttctggaaatacaggatcttcaggaagttcgtcttcaagtt

SEQ ID NO: 1333 - DNA, 200 bp, Lawsonia intracellularis
ctggagtcagtgggaatgttggtactccaggcaatggaggtagtagtgcaggtagcccaggtggaagttcaggaagtccaggtggatcaggtggaaacgttggaggctctgggaattcagctcctggaggaaatggcttagtttccgttacaagctctatgggtaatggctctaaccccccagatccaaatgatccttta

SEQ ID NO: 1334 - DNA, 200 bp, Lawsonia intracellularis
acaatgtctttactagcagatgatgaagatacactttcagacgaagctaaagaagaattgttggtaccattagactataatgaaaatgctattatgggctctcttgatggattacaacaggtccttcatacacctgcaaagagtgttcagagtgcaatgagctcattagcattacagtcacgaactggacatatgtctcc

SEQ ID NO: 1335 - DNA, 200 bp, Lawsonia intracellularis
aactaaacgttttcaggcatttgcttctattgaaggtgaagtgagttcacaatcaggaaatcaaaatgcatatacttctcagtttggtattgttattcatcctgtaccaaacatacgggttggtttagcatacaactatagtagagatcatactggtgacttatatggtatacgttctaaaaaagatattggttttgcaa

SEQ ID NO: 1336 - DNA, 200 bp, Lawsonia intracellularis
aaagtaaagtatcgacacatattttgtcatctatgttggtatggaatgctgaagattcaggttttacagcacatataggtatttcatatggtttagggcaagtaaaaaatactcggtatattagctacttagatgatgttattcatacaaaaggacgttctgacacctccatacttggaggtattgcccaattgggatat

SEQ ID NO: 1337 - DNA, 200 bp, Lawsonia intracellularis
accttacggttaccaaaatttcttcttacaccctatattgaactatctactgtaaatgcttggtggaaagcttatggagaagagtatggtctcttggcttctgacatcagtagaggagaagaaagaatatgggaaaaaagtatgggcttacgtacacgctggagtattacagatgacattcaatggcgagtatggagtaa

SEQ ID NO: 1338 - DNA, 200 bp, Lawsonia intracellularis
agtcattagtggacaaagaaaaagtaaagaattaacggctactcttaaggctccttttgttccttgggaaacatctactcctgataaaaagaaaacgtattctcaactagagttaggtactgcatttgatatacaactttctaagcagtttggcattggtgtaaatggttctattcgtttcagtaagaaaaaagaaatga

SEQ ID NO: 1339 - DNA, 200 bp, Lawsonia intracellularis
gacaacaaaacgctggtatgcgtttttggtataatttttagctaaataaaatatattattcttatgttttgttagtagaatatactttttcatatagataatgttttatctctatatttgaatgtagtatttttatatgtaactaatagtatattactagtatttattgtatgtatatatgtatatcatttgaaaaacta

SEQ ID NO: 1340 - DNA, 200 bp, Lawsonia intracellularis
catgtgtaaaagaaagattattagtaatagaacagtaatgtctaaagagtaatataatgtctttcttcacgttgtagtatatgttatatctattgttgatataagattcatctatatttttttttaataatattataaataatattcgtttttgatagaagtatgttctataagtagagtaaggaatataaaaaatatgg

SEQ ID NO: 1341 - DNA, 200 bp, Lawsonia intracellularis
ttagttatattcgtttattaggaagtatatttttagtattagcaatttttggttgtggcgctcagtttaataaaccctctttacttgatgaaacccctatagattacagttctgtactttctgattacatagtagaattagaaaaagaaccacttcagtatatattactaaaaaaagaaaaattttctcaaatggagata

SEQ ID NO: 1342 - DNA, 200 bp, Lawsonia intracellularis
tataattatcaattcacatcacaacattggtctccagataattttgtatcacctgctatatgggaacatcaggtagatatatatatccctcaccatccagtttcagaacgtgcacttcttatcatcaataatggtattaataatggtacattttttacttctcctaaagctccaactgattttactccagaagtattaga

SEQ ID NO: 1343 - DNA, 200 bp, Lawsonia intracellularis
agaaatcgctcgttcaacaaaaactgtagtcattgctctaagtgatatcccaaatcagtatcttacttatagaggtgactggagatttcttaaggaagatgaaagtattgctatgagttggtctagttttttacaagatccagaaagtcggtacacaagacctctctatgtccctatggttgcagcagtttctcaggcaa

SEQ ID NO: 1344 - DNA, 200 bp, Lawsonia intracellularis
tgactcttgcagaaaaggagttacaagcattaaaaattaagcattttattgtatctggtgtgtcaaagcgtggatggacaacatggctttcagctattgctgactcacgagtagatgctattaccccgtttgttattgatgcattgaatactcggaaagtccttggacatatgtataaaacatatggaaataattggcct

SEQ ID NO: 1345 - DNA, 200 bp, Lawsonia intracellularis
atagcattttatccatattatagatttgatttagataaacaactagatacagttccttttttcaatcttatgaatattgttgatccatatagatatttaggaacaccatataagtctcgacttgctatccctaaatatattgtaaatgcaagtggagatgatttttatgtccctgataattcaagtttttactatgatga

SEQ ID NO: 1346 - DNA, 200 bp, Lawsonia intracellularis
tctccctggagagaaagcattacgttttgcaccaaactcaaatcatcatgggatattaaatttcacaaaacaatcgcttattccttttgtgaatagagtacaaaaaggtatttcaacgccagttttagatatttccacagagatgacggaacgagttcaatatgtgactgttcgtttttctgaagttccagagaagatag

SEQ ID NO: 1347 - DNA, 200 bp, Lawsonia intracellularis
tactttggaaagcagcaaatccagagtcacgagattttcgttatgcctgtcgtgttaggtacatggaaacaccattacacctttctgcaacaggggaagttagcgtttcattagagatcccttctgtaggatggcaagctgcttttattgaagctacatttaaagatggttttgttgcaacaacaccagtgtatatttta

SEQ ID NO: 1348 - DNA, 200 bp, Lawsonia intracellularis
ccaaaagatatatatccacctataaaaataccacctgtacatggattattatgtaagtttgtacatggtcgaacctagtaactagtagttgttgtactgataatctaaaaggatatagatgcatgtcagcctttcatcatagaagatgtctgttataagtacactatctatgatggaaggggattatgatgagcgaagaa

SEQ ID NO: 1349 - DNA, 200 bp, Lawsonia intracellularis
gaaacaggatttgttaaaaagatagatggaatctatggtgatatccgtatagaactccatattggagagccatatcttaatgaagcacaagatatttgtattcctctattacgacgtttatatgttatgaaaaagaatagttctaaagtctccaaaaaagaacatcttcagtaaagtctgatggattaagtcgaccttta

SEQ ID NO: 1350 - DNA, 200 bp, Lawsonia intracellularis
atatccatgagtacagcagagtttatatttttaaagcatgaaagcaactcttgaggttggagatgtaaatagattttatgaggaactgcaagaataagtgcatcaagctgtttaaataccgaaaattcttcaatgacaatttggtattctttaagtgcatcttcagcatcaacaagtggatcatgtacaagtggtgtaac

SEQ ID NO: 1351 - DNA, 200 bp, Lawsonia intracellularis
accaaactcttctaactcgttaacaatatcaatgacttttgtatttcttaagtcagagacatcctctttaaatgttaatcctaaaatgcctacacgtgccttattaataagtacattcttttttataagcagttttacacaagtttcagctatatattttcccatttcatcattaatacgtcttcctgcaagaataactt

SEQ ID NO: 1352 - DNA, 200 bp, Lawsonia intracellularis
gaggatgatatccaacttcttctgcttttcgagtaagatagtatggatcaactccaatacagtgacctccaacaagtcctggacggaatggaaggaaattccattttgttccagcagcttctagtacttcaagagtatcaatatcaagtttatcaaagataatagcaagctcattcataagagcaatattaagatcacgt

SEQ ID NO: 1353 - DNA, 200 bp, Lawsonia intracellularis
tgtgtgttctcaataacttttgcagcttcagcaactttaagacttgatgttttatgtatgcctgcttgaataaacgttccatagagtgctgtgaggagatctgttgttgctttgtcgctccctgaaacaactttaacaatattttctaatgtatggatggtatcgccaggattaatacgttcaggagaataaccaactgt

SEQ ID NO: 1354 - DNA, 200 bp, Lawsonia intracellularis
aaaatcagtaagatatgataagccagaaacttcttctaaaagtggaatacatatttcttctgttgcaccaggatataccgttgactcgtatacaactacacatccttgacgcatatgtcgtgcaaccatttgagtagctttgataagaggtgtaaagtcagggttacggtatgtatctataggggtaggaacagctataa

SEQ ID NO: 1355 - DNA, 200 bp, Lawsonia intracellularis
taatgatatctgcttgatggatatctgtttgattataagaaaaggatgcttttgtattatctaatacttcacttgaaatttcacctgttcggtcatattttctaagtaattcatgtattctacgtttagatatgtcaaatccaatagctgggaaatgatgagctagctgcattaaaagaggtaatcctacatatccaaga

SEQ ID NO: 1356 - DNA, 200 bp, Lawsonia intracellularis
cctactaccataacacagatatctttgttatataactgctctatggttaccattgtatttctacaaccagcttttgtacattcatgttttgtactcttttgtaggtcttttttcatacttttaactcctgatctctttcgtatctgacaattttatcattatataactgttaatgtctatatacaagaagtaggtgggag

SEQ ID NO: 1357 - DNA, 200 bp, Lawsonia intracellularis
tagctggtatcttgtatgatatttgtttagtaataagagttgtctcagttaatactttgtcaacataagtagttactgtgtagtattactttaaaaaagtaattaattgtgataagatacctaaccataactaatattattctataggtgaggagatgagagttgttgctatcttgagcacagatttttgaaatattcag

SEQ ID NO: 1358 - DNA, 200 bp, Lawsonia intracellularis
gcactattagagtgaggagaggtttagatacattagtagagggaactgattgatatattgaggagtctattggtgaggaagaagtccttgagttgtttcaaagtaagcattaccacaggtgatacaatgaagatttacaggtagtttttcaccacattggcatatccacccttgttgtttagcaggatttccatacgtta

SEQ ID NO: 1359 - DNA, 200 bp, Lawsonia intracellularis
atgcatgatctggaacatcttttgtaacaacagagcctgctccaatgaaagcaaatcgtcctatagttataccacaaatgattgtacaatttgctccaagggttgcaccatatttgacaagagtgggtctagcttgttccattcttgggatgaatgctcgtgggttaaaaacatttgtaaagaccatgcttggtccacaa

SEQ ID NO: 1360 - DNA, 200 bp, Lawsonia intracellularis
aaaacataatcttcaagggttacgccacgatatatactcacattattctgtattttacagccatttcctatctgcacatgtggtcctatagaaacattttgtccaatgttgcaagattttccaataatagtgaagggaagaatatgagagaagtgccagatggttgttccattaccaatagtgacattttcatcaacaat

SEQ ID NO: 1361 - DNA, 200 bp, Lawsonia intracellularis
acttgtgggatgaatagtaatcatgaaagaacctctttcagtgtgttacagacaagttttacatcatcttgtgtcatatatggatgaaaaggaagagaaagaatatcatgagaacatgttgtagatataggcatatcctctgcctcataatattgatctgcaaaggctggttggatatgcaggggcttaggataataaat

SEQ ID NO: 1362 - DNA, 200 bp, Lawsonia intracellularis
gtttgttggaatatctttttctgcaagataaatagcagcaatatcacgcatatctgatccaatacgtatagagaattgggcaaagacactaaaattacctggtgcaatatgtggaagggtgatatcttttactccagtaagttcttttgtataccatgttgcaacagtttgtcgtgtacaaagttcgttagggaaaacat

SEQ ID NO: 1363 - DNA, 200 bp, Lawsonia intracellularis
caagttttgctaaaagaatagctgcttgaagggtatctaggcgtccattgacacctatcctcacattttcgtatttatgttgtcctttcccatgaactcgaatagatttaagtatgccagcaagtttatcattatttgtaaaaatagcaccaccatcaccataacatccaagtggctttgcagggaagaagcttgtaaca

SEQ ID NO: 1364 - DNA, 200 bp, Lawsonia intracellularis
gcacaatcacaacctaagttgcaggttgattgatctttataggttgcgccaaaactttgggctgcgtcttcaatagaatagaggttaaactgttttgcaatattaaggattcgtgtgtaatctgcagcctggccaaaaagatctacgggaattactgcacgtggtgtaagttcagtttctagggctgttacaggtaatgg

SEQ ID NO: 1365 - DNA, 200 bp, Lawsonia intracellularis
gtatatagaaggatcttgatgtttaacagcaagtatagctttttttaattggtttggacacatagtaaatgtgaaaggatcaatatcgacaaaaacgacagtagctccaagcaatgcaggcatttctgctgttgcaaaaaaggtaaaagcaggtacaaaaatagcgtctccagcatcaatttcatgagccataagggcca

SEQ ID NO: 1366 - DNA, 200 bp, Lawsonia intracellularis
taagtaaggcatcggttcctgatgcacaacttatacaatgttttgatcctgtaaaagcagcaagttgtccttcaagctcctttacttcaggtcccataatgtactttccatgatcaagcagtgcttgaatacgtgactcaataactgttcgtatacgtttttgttgagaggctaaatcaataaattccattggatattcc

SEQ ID NO: 1367 - DNA, 200 bp, Lawsonia intracellularis
tttgctagtagcctttacatgtcgagaactgttagcttttaaagaacactttatggaaaatctatagttagttatgggataattttttttttgtgaaaaaatggtatcaacaaatattgttaaggggttaaaaggcgatagtcttgttatgcattgcctatggatagatattgttgatagataggtggctatagtcgatg

SEQ ID NO: 1368 - DNA, 200 bp, Lawsonia intracellularis
accgtttttcttgagcaatacaaagattaataggataaatgcttttgttttgttgacgtcctaaacagatagttttctctttagaagaggttgaatgaagagacaataactgattatgttccatgtacatttcccttgcaagatacgtcattgggtaataattatagcctgtgtatatcagtagtatcttgattcgatca

SEQ ID NO: 1369 - DNA, 200 bp, Lawsonia intracellularis
catatacgttaattttgaaatagaacattctttcatagttattttgtatatcaaaattgttatagttttgttatctaattagagatagcattctttttagagataactgtgtatatcaatattcaagaggaagagaaactgttattcggtctcttgctgatttgtatgctgcaatgagtacttcaagtgacttaagacct

SEQ ID NO: 1370 - DNA, 200 bp, Lawsonia intracellularis
tcacgtccatctgtttcaggttcagccttgccacgaaggacatcgataatattttggtaatacaatggatgaccaaacccatatacagaatttgtttgatagcttacagatgtaacgaggtcgtcatattctttaggttcagcaaagttccatagttgtatttcattaacagcaactcctcctatgcgtacagaacctgt

SEQ ID NO: 1371 - DNA, 200 bp, Lawsonia intracellularis
atctccaaggattgtaatgcttccttcaagatttttagggtatgttaacattgatacagccatagagccaagggctccattacgccatcggacattaagtacagctgagtcttctacttcaatattacgtcctagtgttgctatcatagcttgaacgtcagctataggaccaatcagccattcaaatagatctacatagt

SEQ ID NO: 1372 - DNA, 200 bp, Lawsonia intracellularis
ggcttgcttgattcatgagtgctccaccgtccatttcccatgtcccacgccattttgcagagttgtaataatcttggggacgttgccagaaaacatttatatggaccatatttatatgtccaaaacggttttcatctatagcacgttttaacagttgaagagttgggttaagtctattttgttttataacaaacagatat

SEQ ID NO: 1373 - DNA, 200 bp, Lawsonia intracellularis
acacctgcttcatcacatgcttgaaccatatgtaatccatctttccatcgagtagccattggcttttctgtcatcacatgtttccctgcatttgctgagacgatcgtctggtgagcatgcaatccgcttggtgtacaaatagctacaatatcacattctgtgtttgcaaagagttgttcaaggttctcatagccaggaac

SEQ ID NO: 1374 - DNA, 200 bp, Lawsonia intracellularis
attatattttttactatagttattacgactttcggcataactgtcacatacagcaacaagctcaatgtcttctttgtgatgattaattgcatctatatgattccctgcaatacgaccacaacctatgatagctatttttattttacgtcctactatgggttgcttcatcaatgacactccttttgcttgttagttttagg

SEQ ID NO: 1375 - DNA, 200 bp, Lawsonia intracellularis
tctggtatgtacaatataccatacctataatctctgataaacagagcatgggtattatataaaaaatatataaagatttattacaatgttatatactactaattttagttatagtaatctactatatattacatatttactatattgtagtaaatatatattatgtactaaaaatataatagtatgttattatatattat

SEQ ID NO: 1376 - DNA, 200 bp, Lawsonia intracellularis
atgtaaaaaaatccatgtactctatgtttttagagtacatggatttttaagtatacctatataaaagtagtaagtattttttaaattcttctattcagctatatgcatattatttgtagctataggtattggtaatactgtatgatttgtaatgggttcactttttgaagcattatgttttgaagtattatgtaaggtag

SEQ ID NO: 1377 - DNA, 200 bp, Lawsonia intracellularis
aatctagctcttttaaaacgtctgcgagttcacatagtgtggtataagtattagagagagcgcagtctttcaaagtagagtcaggttcttcatttgtagtgttgaggggtacacgtgttttagctatttctttgatggtatctgaaagagatgaaagttcttttagtgtattttgtatagttgtgataaaatttaatgtg

SEQ ID NO: 1378 - DNA, 200 bp, Lawsonia intracellularis
attttcccagatgttagagcataatttacatgtgttgtattatatttattgatttttttgataacactagtaatgtgttctgtttgtgtttgaatattataaagagtttgttcaattttctttattgtagacatagattgttgtgataattttttcacttcatttgctataatagaaaaaccttttcctggagttcccat

SEQ ID NO: 1379 - DNA, 200 bp, Lawsonia intracellularis
tttacctgcttccactgctaaattgatggcaagtaggtttgtttgatttgttactctatcaagtaatgtgagttttaaaagtatatcattaatccttttatgtaagagtataatgatattttgtagagaggagatatttatatttacatgttctattgaattaatagcatgtgttgtattttttatatcctgttctgaat

SEQ ID NO: 1380 - DNA, 200 bp, Lawsonia intracellularis
ttttataactgttctgaatttttgttacagtacattcgagattttgatttatagtagtaaatagatcttctatagatatagatgatggagtattttttacaatttgcattttaacagactctgtacacttagaaagataggctgtgaggttacatagtatttcttgagcgtgtttggttacattaacagctttatctgga

SEQ ID NO: 1381 - DNA, 200 bp, Lawsonia intracellularis
agtgtttctaagtgagttattttagcagccattttttgttcattaattttagagctactaataatagtagataattctatttcatgctgtttttgtgtttcttttgtgatacttagttcatgtttgaggttttgaaattgttttataagttcaaatgttgtttgttttaatatatgcatttcatttttacacgtatagta

SEQ ID NO: 1382 - DNA, 200 bp, Lawsonia intracellularis
attcagagaaggtatttttgtttttgacagtgacttatttatatcttgtatgagtttattaataggtctaagacatttttgaataatgacccctataaggatgaacgaaattatcataagataggtagagatacccattaacatgattttactcggggggatataaatgagtaaacaacttgttaccataagggaagctg

SEQ ID NO: 1383 - DNA, 200 bp, Lawsonia intracellularis
aaagcaaaagaaaagaaaaacaaagagacatataaaaattcctctatgaaatttggtcgatgcttgaatgtggtagagagttccttggagaggagaatagaatataaaaaaggatatatagtatggttcattaatcaaatgataaatattgatccatctatataatattataatagatatataaaattaaagaagtagct

SEQ ID NO: 1384 - DNA, 200 bp, Lawsonia intracellularis
atattataacactacatgatctttaatttaaaaacattataagtattttatatcagatgtcaataactttaatttttgtataaaattattatatgtatgtaatataaataagttatataaaatatactgcaattttttataattttatcctttttaaaataggttatataaattaaaatagttacaacatgaggtgtatt

SEQ ID NO: 1385 - DNA, 200 bp, Lawsonia intracellularis
ttaatatttacatatgtattatagtttatttatagttataaatataacaagttacttttagtaaagtatagatgtaaatataaaataattagtaatatcttattattggaaggaatgtagtatatatatatatgtaaataatgaacaggcctaataacatatagtcattaggcctgcattgacgatgctacagtataaag

SEQ ID NO: 1386 - DNA, 200 bp, Lawsonia intracellularis
ttcagttgaaaaactgaacagtttttatatggacacggtgtgcactgcctaacagtgttatacgtcgtcacacacaaaagataaggggatatttactccctagactcccacctcactgggagaaagataggtcatatatatgactttctctttcagaaaaatcattctgaacttttttgtctaaaatgtaaagcattttt

SEQ ID NO: 1387 - DNA, 200 bp, Lawsonia intracellularis
ttattttttagctgttttttatttttagttattactatttcattaataaatacaatatgtttagaaaattataactagttaaaaaaattgtaaaatgtaagagggaggtaaggaacaaagaaacagaaaagttatatcaattataatatagcagattaataatatgtctatagttaaaaaagaagtttttattacatttg

SEQ ID NO: 1388 - DNA, 200 bp, Lawsonia intracellularis
ttatatttggttattataatgtaagtagttagttgtaagcaaagatactccattcattattttctaaagaatatgccatgtgcgatgaatattctagactttgttcaactactttaatagagatattgttatatgttaggtaggtaaggtaaagaccttctgttgtaggtatacctttttcaaacggtagttttttggac

SEQ ID NO: 1389 - DNA, 200 bp, Lawsonia intracellularis
tgataatatccttttttggataaaagaagtgtaactgtatattcgccagggagtatagggaagtttacaggagtgattattttccctattggagaaaaagggttaaatttcaagtcttgagtaagaatagtatgactatgtgcagttgtattttctttaagaagaatgaaaagttttatttgttcaaagagatttttatt

SEQ ID NO: 1390 - DNA, 200 bp, Lawsonia intracellularis
tgttaatgtatagtcaattacaaaacaaaatttttcatttgtgtgtattaacaatgtattttcgttatgttcattaatacatgaaatattatctatcagaagttctggttgtgtatttgaggtgctaatatgaataggatttttattgaaagcaaggtgagactcttcccaactagatatttttaaaacagctagttctc

SEQ ID NO: 1391 - DNA, 200 bp, Lawsonia intracellularis
caaagtaatattcctgagtattttgtataacaagaacatctacttttacaggtttttgtgatcgatagtgaataataatagaaagttcattaagattaaggtgtcgatatggcacattaaaagatatggtgccattagtgaataacattccatatttaagtatatctacagataatttgttatcgaaacagtgcattttt

SEQ ID NO: 1392 - DNA, 200 bp, Lawsonia intracellularis
ttagaggataacaagtcagtattatgattttctgtgagatgacactcagaaagaatagctcctcggtatactaatgatatagaagagatctcaagtggtgcttcaagaggtaatcctgttgatgagcggaattctatagaaattttttgttgatgttggatgtttttttcaagtggatgacgttgagatttgttagaaga

SEQ ID NO: 1393 - DNA, 200 bp, Lawsonia intracellularis
tggatgtataatcttagatgttgccattacttctgtttgaggtacagtgttgtttttgtctattttattcataaaaacaccttaattagtgaagagcagttggtgtgtgtgctaacaagtttagagaaaagtatttttctaagagtgtaagttgctatttctaaagatgtaataatgatgatagtaaaagcattgaaaaa

SEQ ID NO: 1394 - DNA, 200 bp, Lawsonia intracellularis
atttttatagtataagggacagcctatattttgatgagtaggatgaaaatgtatatatgtattcataataaccaccattcataccataatcacttactctatcctagataatttaagcatagcataacctactagtgttcacaagtttttatttttttgaaagatattctttaacttatataaaatacaagggggaaaag

SEQ ID NO: 1395 - DNA, 200 bp, Lawsonia intracellularis
atatgcactcctttatttattagtgttagataaaaaagttattaaggtaaataggataatagcttagtgtagttataatatacaaaaatataatacttttgaaatatataacataattactaacaaaaagcattagatatgtgttattattggtagtaagataaattatatttaagaagtatttctaacggactatagtt

SEQ ID NO: 1396 - DNA, 200 bp, Lawsonia intracellularis
ataaataactttataaaattattgaaaatcagtatgtcttaattataatttataagattcagataaggagtaaataaacattatattagtgtatagtcttaggtaggttaaaaatattagaatactctcatagagatagcataggtaggttaaaacggcggtgttatgatagcattgactacatacttttttattctaca

SEQ ID NO: 1397 - DNA, 200 bp, Lawsonia intracellularis
actaattttgtttgtagtattaagtattatagctgttaaaagtaatattattgttaaaggaaatcttttaataatgctctctgcgacattattagctacaattcctttacattatataggtcctcgtatcgcacgattatattctaatgaagtaaaaattgatactatgctagaattttttatttttactattctttttg

SEQ ID NO: 1398 - DNA, 200 bp, Lawsonia intracellularis
cagggcttatacatcttatctcttttttatttaaaaaatatatttttaaaaaattctataagcctactaatgatacactattaagttttatttttgcaaatctttatcctgtatatgctgctctttttgctattattctttttttttggaggaagcatgattggtttccaaaatagagtgtattttttaatataattata

SEQ ID NO: 1399 - DNA, 200 bp, Lawsonia intracellularis
tctacttccctttagttaaacaaatatatgacaatattacaataagtagatgtgatagatttaacagaggccattatatatggatacaatattctttattatatgtatgataaaataagactggcatttttatggtagaaactcgtgttagaagctcgttatactttatcttaggatcgttatgccttggagtaatagct

SEQ ID NO: 1400 - DNA, 200 bp, Lawsonia intracellularis
actattcaggttttagttcctgaaaatatttctccattactgattggtgcaatgcgaataacaggtggtgccgtaacattacttttgtggggaatttttactcatggtcttccaacagctcgttattggccgataataccaacagtttgcgcagctcttgggcttattgcttttcaaatgacattttttgctggtataga

SEQ ID NO: 1401 - DNA, 200 bp, Lawsonia intracellularis
taaggctggaatatcccttggcacatctatacctattggcattgttcttttagtatcaggactgtctgcaaaacttttttatcgtgaaaaagtttctcttcaatggattatctatacaattttggctttgataggtcttggttgtataattgctactagtagcagatggcatacaaacaaagaagctattattactgcaa

SEQ ID NO: 1402 - DNA, 200 bp, Lawsonia intracellularis
gtattgctggtattggttatgctttattccttgtttctagtaaagtattggtccgttttcatcgtgctgaaagtgtgatgactgtcttgtttactattagtgcaatagtactcttccctatttttttcatagagccatttagctggccaggaaaaggttctactgttctcctttcgttaatacaatttgctattataaca

SEQ ID NO: 1403 - DNA, 200 bp, Lawsonia intracellularis
acagttattgctttttctctgattggtatggggttaaaaaatattacactttctgtatcttcaacactttctgttgcatgtacttttatggctgtatttttaggtatttttttcttggaagtacatcttagtatgcaacttatttttggtttaatattgttattagtatgtattacaatgcttgtaagacgtgagagaag

SEQ ID NO: 1404 - DNA, 200 bp, Lawsonia intracellularis
aaatcctttttaaatcacacacacacacacacactctctctctctctttctcatccacttatttttatcttttttttattctcttcttttcttattctttcattactttttcatatggatacaatttccttttaatatcatttatagctttattatataaactattatttgtatctattaaatagtatctaaaaattttt

SEQ ID NO: 1405 - DNA, 200 bp, Lawsonia intracellularis
atatcctttttctagaagatattcttttgaacatttaataagtaaagttttattttagaaaatatctaatgtttctctttatctctgatatgaaagatttcttattaagaaatatgaatacattttttttagaaaaagtattgtaaaaaaataaagtctatacttaccatagcaagcacagactttattatttaatggtt

SEQ ID NO: 1406 - DNA, 200 bp, Lawsonia intracellularis
ttcatatatggggttaaagatactatagatatattctaaaataggaaaattctattatagatatattatatagaatgttttacctcatctgtatcttttttagttatgggtatgcgtatgtccatagttaccttgtagttatctacggagccgctctcttatatagtatgcttttaaattgttgactactaatctaatgt

SEQ ID NO: 1407 - DNA, 200 bp, Lawsonia intracellularis
cagatataaattagaatataagaaaagtaccttttagataagagaaaattttcaactttttgaacataaccttttgagttatatgtttttttatttttaaacagcttttctatttctcttatgattttttactactttttatagtggatattaacttttgctccgtgaggtatctcttatgagaagtgttaacttgttag

SEQ ID NO: 1408 - DNA, 200 bp, Lawsonia intracellularis
ctttcctctgtgtatctattactttttttggattacttaatagttctttttcttatggctctcaagaacaactagcacaaaaggagcttaaacaactacaggacaaggttgttagtattcttgaagaaaaatgtttatcttgtcattcatataatgcagagttaccgttttatactaaaatcccaggcattaaacagatt

SEQ ID NO: 1409 - DNA, 200 bp, Lawsonia intracellularis
attgaaaaagactttaaagatggtctgcgagcatcagatttaaatcaagattttattgaagcttctaaaaaaggtataatagatgaagcaactgtagctaaattagagtgggttatagaaaaccatacaatgcctccagcaaaatttacagctgtccactggggaagtagagtttcaaaggaagatgaaaaaattattct

SEQ ID NO: 1410 - DNA, 200 bp, Lawsonia intracellularis
tgaatgggtaagaaaatatcgtaacacatattatgcaacagggttagcgtctccagaacgctctaatgaacctattcagccaattccagatactattccttataataaacaaaaagcagcattaggagaaaaactttttaatgatagacgattatcccatgataatacaataagatgtgctagttgccatgtaacaagtg

SEQ ID NO: 1411 - DNA, 200 bp, Lawsonia intracellularis
agggaatggcggatggcaagcagtttgcgacagggatcaataagcaaaaaggacatgttaatgctccaactgtatataatgctatttttaacactcgtcagttttgggatggacgtgcagcaaatctccaagaacaagcttctcagcctccattaaaccctatagaaatgggaagcactagttgggatgagattcttggg

SEQ ID NO: 1412 - DNA, 200 bp, Lawsonia intracellularis
aagttagctaatgataagaaattaacagaagagtttttggcagtttatcctgatgggtggactgaaaaaaatgttacagacgctattgctgagtatgagagactatttattacacccaatagcccatttgatcgttggcttaaaggtgatgatacagcactaacctcagatgaattgagaggatataaactctttaaagc

SEQ ID NO: 1413 - DNA, 200 bp, Lawsonia intracellularis
atacaggtgtgcaacatgtcatgttggtaagtcaatgggtggacagtcctttgaatacatggatcttaagaaagactattttgcagaccgtggatatgttgaaggagttgatgataatggtagaatggcctttacacatgatcctagggacttgcatcgatttaaggttccaaaccttaggaatattgagatgacggctc

SEQ ID NO: 1414 - DNA, 200 bp, Lawsonia intracellularis
catatcttcatgatggtactgttacaagtttagatgaggctgttcgcattatgggtatctatcttgtaggaatggatattcctaagtcagatagagattctattgtgttatttttgagaacacttacaggtcagttcaatggtcaaaaagtccttggaacgcctgtaccacaataatagtagatatgtttctatatataa

SEQ ID NO: 1415 - DNA, 200 bp, Lawsonia intracellularis
aaaaggaagctgtaagcttccttttttattaactagttgttagtagtaataattactctagagtaaattggagcctttgcatctgtataattaatatagtatttttgtcagtttttagtgattaagactggtataggtaaactgtaataagtaattataaatcaataattagagatcggtatcttttggtttttgagcca

SEQ ID NO: 1416 - DNA, 200 bp, Lawsonia intracellularis
catatagatatgtctagtttatataggatacatagtagtaaagtaaagccactacatttgttacatagaagagagagaatatgtaaagtttaggtatgatgggtattaagctgttattaacctagtataatgacaaataattttacagagttctatagaatactatataataaatgcttcaagagtaatttatataatcc

SEQ ID NO: 1417 - DNA, 200 bp, Lawsonia intracellularis
tacgtagaaaagtagtgttctatctacagggtgaaattgtcatagtgtattagatgtaaagaaggattcttttcttttaactaagagaaaagaatccttctttatgggtaaattataggattaagatataggatttttcatttcatgaataagtgaagcaagagactgtgcttgttttgctaagtcagaaacagcttgtg

SEQ ID NO: 1418 - DNA, 200 bp, Lawsonia intracellularis
aagcttcatccatggcccttgctgtttctgtagcaatatgattaatttcagaaatggattgattaatttcttctgtagaagctgactgttcttcagaagcagttgcaatagcacggacttggtcagctgttgcatctaccatatgaacgatttcatctaaagcaagtcctgactgagaagccagggttgtagcaatttca

SEQ ID NO: 1419 - DNA, 200 bp, Lawsonia intracellularis
atattttgaacagctgaatctacttgagacatactctgtgtagcactttcttggatagctttaatagcattgccaacatcagtagtagataccatagttttttcagcaagtttacgtacttcatcagcaacaactgcaaaaccacgaccagcttcaccagctcgagcagcttcaatggcagcattgagtgcaagtaggtt

SEQ ID NO: 1420 - DNA, 200 bp, Lawsonia intracellularis
tgtctgatcagcaatatctgaaataacacccatgatttgatcaatagattgtgcatgatcgcctaagacagccatatcagactttagctcacgggattgattatgcacagtttctatactttgaataacttttcggacaatatcagcaccatcaatagctttttgacgtgtttgagaagaaatatcagatgtttcacttg

SEQ ID NO: 1421 - DNA, 200 bp, Lawsonia intracellularis
catttttagcaacttctacaactgttgtactcatttcttccatagaggttgctgtttctttaactcgagctgcttgctcattagcaccacgtccagattcttcaatttgtgcagaaagctctgtagaagctgaagaaatgacattagcaatatcttcaagacgccctgctgctgtaaccatcccttcgtgtctaccttgt

SEQ ID NO: 1422 - DNA, 200 bp, Lawsonia intracellularis
tctgctcttttaagggcttcttctgctttagcagtggctactcttgcttcttcttctttacgttttgcagcttcactttgttgtgtagcttcaagaatttttgctttaagagagtcaaccattgtatttaatgctataccaagttgtcctatttcgtcggttgaggtgatctttagatgttgatcaagatgtcctgctgc

SEQ ID NO: 1423 - DNA, 200 bp, Lawsonia intracellularis
aacattttgagcaaatagtgttgtttgggtaacaggtttagttatactccttgtgacaatgaatgacacaacgattgtgataagaagaagtattccagtaataataaaaataagtccatttgcacgttggaggcgtgtgttaacatatgtagcttctgtttgaatttttgagagattgtcatttgttaacttcattagtt

SEQ ID NO: 1424 - DNA, 200 bp, Lawsonia intracellularis
tttcacctaaggcatcagcaagttgacggcgataatctaaatctactttgctttgttcagtcatagaaacaaggttttttaggagttgattatatactcctatagacctgattaatgtttgaagtccattacgcatatcttctgctctaaagcgatttttaaatatagatagcttattcataagctcatcaataccttga

SEQ ID NO: 1425 - DNA, 200 bp, Lawsonia intracellularis
gtactttttttcaaattatcaatatcttgttccctcaacgcactagaatagtcgcctcgaaggagatagagttgcatcattaaagttcctagctctgaatagtataacagtgcattgtcatcattagcgtattgcttgttcattattgatacaatttgactatattgctggaagacattgtggataacattggtaccttt

SEQ ID NO: 1426 - DNA, 200 bp, Lawsonia intracellularis
agaggattcttcattaaagtccatagatttactatacagattttttactgcaacatcataatctgtaaagatttttcctatttcattgatatctttttcaaggtattgatttgaggtagacgtagaagcaaattttttggcttggctgagatattctctagctttgttaagttcttttatacagcgatcatagtcttctt

SEQ ID NO: 1427 - DNA, 200 bp, Lawsonia intracellularis
gctttctagaagcataaaatcctcgcatataataaatagcttcttgataacgtgtgagcatattggaagcaatttcaattatctgtgatgtttctttatctataacttccatagtcttgctagaaggtcctagttcttgagaaacatagatccccatcaaaactaccatgatcattccaatggcaaaaccagcacttatc

SEQ ID NO: 1428 - DNA, 200 bp, Lawsonia intracellularis
ttataaccaagcttcattgtacgcccccatctattatggttgtatgagaactatagttttttggtcatgaatagttttatacttgtataaaaattttaaatcaatacatttataaaacatataattaaaattttatatgtatagatatatacttttaatatttattaaatatttttttaataaaaaatattatttatata

SEQ ID NO: 1429 - DNA, 200 bp, Lawsonia intracellularis
ttacataataatttttatattttttgtaatagtaaaaaaatttgtaataaagatagtatatagttaaaatttatatattattttaatatatagtaaaaatatgtttttttaatgtaaaaaatatttttataacataagtttcgtcagatgttgaatgagaaaaggctttatgataaacttaatgattgaataatgcataa

SEQ ID NO: 1430 - DNA, 200 bp, Lawsonia intracellularis
agtataccttgctattgtgcagagctaatctagggatagaggatcttttttatagtcatgataggcgttgggttgtcaaaaaataattatgtggttatatatgtaacaaagtgtattgctatattgttgggtcttatatttttagagaggttttatgtatacgcttactattgaacagctgcgtagtgatcttgaagctc

SEQ ID NO: 1431 - DNA, 200 bp, Lawsonia intracellularis
acttaacagagctttcggcggttacaagacagactgataattatacattgcttaaaaagcttaaacagagattagcaaagattagagaggattatcttgatgcttatgaagcacaacaagcatatgatgcttttttgacaagtggagactctcctattcctttaagcgaagtagagagaaagcttgccttggcagattaa

SEQ ID NO: 1432 - DNA, 200 bp, Lawsonia intracellularis
ttttatacctcatgcagcaaaacagcttaggaagttagattcagagatccaaaagcgtatacttcagtttttacatctacgtattattaatactccggaaccacagaaattaggtaaagctttagttggaacacatcaggacctttttcgttttcgtataggaaagtatagaatactatgtcatatttgtaaggaaaata

SEQ ID NO: 1433 - DNA, 200 bp, Lawsonia intracellularis
atacaattcttatagttgctgttggacatagaaattatatttataattaactctccatgtaaaagtttatttttagtcattttaggatagattaacaaatgtaatctgatatagtttatatcttctgtttgaaacatccctgatagtcagggatgtttttttatcgagtaaaatcagagattgttctattattagagaga

SEQ ID NO: 1434 - DNA, 200 bp, Lawsonia intracellularis
gcattctacgtactagaaggtatacaacctattattatattctaattaataaacatggatgacaatataagattaattagaatacagagtggttactatttaaatgatattaatatgggtttataactacaacttataattaaaaaataaaataattatttatagactgcttttaacaagtatgatttttttcaagatat

SEQ ID NO: 1435 - DNA, 200 bp, Lawsonia intracellularis
agaagaatattagaaggaaagcctaagaattttacatgatttgtatatatatatatgctgtagttggttacagagattttttaactcttttgttgaaagaagattaaggtgttgttcttgagaaagttctttatatcctaaaaggttaagtaatttcctatgaagaggtttaggaagccagtggattaaaggaagtaggg

SEQ ID NO: 1436 - DNA, 200 bp, Lawsonia intracellularis
aatgaaattctaaaggatgccagcgatttggcgttgtaagaaaaacatatttttttgcaactctgtaacactcgttgataaaagattgttgttgtgaagtacagcctgtatgttcaattactgctgaagaaaagacaagatcaaatgtattatcattaaaaggaagtttacagccatcgccatagacaaatttaagacca

SEQ ID NO: 1437 - DNA, 200 bp, Lawsonia intracellularis
ctgtattctttctctaaccaagaggcgttttgtttagaaagtgcaacaattttttcaggataaggaaataatttttcaaaaaagtttgattcagcattatctttataagatgtaactcctatatcaagaacatgttctagtgatgagaaatcaatataactttttagccgtttaaatatacgttttcgtatattgaatga

SEQ ID NO: 1438 - DNA, 153 bp, Lawsonia intracellularis
aatattacttaaaaaagatagcggtaaattgtaatctataccatgtataagtgaaacacgactcatatctttatcccattgagcactaggttaactatgttttaaagaagaatgaaataatataactaacatatcttagttatattgttttct

SEQ ID NO: 1439 - DNA, 200 bp, Lawsonia intracellularis
atgaagatctttttatagagatagtaataaaaaaatgtcagatagatatacattatagtatagtagagaatatataaaatgaccaagtgatattaaaagaaaaagttagaaaaatgtatagttattaattatagtctgttgaaaaaataaatatatatctgttaataacttcttagaattttgtttaaattatgtatctc

SEQ ID NO: 1440 - DNA, 200 bp, Lawsonia intracellularis
caatatatctgagaaatcttagtaaaatgccataattaataaaaaattaaataaaacaatatattatgttatattttacttgggggaaatattctatagatgactcctagaaacacgataatccatctttgtttttttttataactctaggataattatgtcatatatgaatacaacatgggaaaaagtctgtgatagcc

SEQ ID NO: 1441 - DNA, 200 bp, Lawsonia intracellularis
ttcaaaaaaggcttagtccaggaacgtttaaagtttggattgctccattagtagcttctgaacacgatggacaattatttctttatgctcctagtctatttgttatgaattggattcaggagcgtctttttgtagatattactgaagctgtgagtgaagtttcaggagggactatgaaagttcagattgaagtaaaatct

SEQ ID NO: 1442 - DNA, 200 bp, Lawsonia intracellularis
agtgtcccagacaaaccacaagtttctttaactgattataataataaacaacatataccatataatggttttcctaatactaaagtttctatttcaagaagtcatatatcctctcaaacagaacagttacctttacctgtttcattagttaaagctccattttctagtcgttcatggcgttatagttttgattcatttgt

SEQ ID NO: 1443 - DNA, 200 bp, Lawsonia intracellularis
tgttggtccttgtaataacttagcccatgctgctgcacaaaatatgattaaagatacagcctcagtagatacgttatttttaagttctggtccaggtcttggaaaaacacatcttacacaggctgtagggcaagcactttgtaacatatctaacagagcaaatccaaaagtcgagtatctaactgcggaggagttttgtt

SEQ ID NO: 1444 - DNA, 200 bp, Lawsonia intracellularis
cttgttttgtgcagtcattacgaacaaaaaatgtcgattcttttaaaggaaggtttagagatacagatcttttccttttggaagatatacattttttacaaggtaaagagaagatgcaggatgaattgttagcaactattcgatcattacaaggacgaggaagtcgtgttgttttaacaagctcatttgctcctaaggag

SEQ ID NO: 1445 - DNA, 200 bp, Lawsonia intracellularis
ttaaaaaatgtcgataatcgcctggtatcacgattttgctctgggtttttagctggaattgaaaaacccaatgctgaaacacgtcggcgtattttaatagaaaaagcaaaagtacatgctgtcgtgttatcagaggctgtagctgattttttagctatgaagcttgtaggagatattcgtcagcttgaaagttctatttc

SEQ ID NO: 1446 - DNA, 200 bp, Lawsonia intracellularis
taaccttgtacttaaagcaaagcttttggattgtatgatctctatggatatggctaaagatgttatagctcaatatacacaagatgatccatttatgaatatagactctattatccatgcagtatcaggaagctttggattacaagctgagaagctttattcacgtagtcgtaaacaagattttgttgttgctcgaaata

SEQ ID NO: 1447 - DNA, 200 bp, Lawsonia intracellularis
caattttttatcttgctagaaaacatacagatatgtctcttcaggagattggtgatcgttttcatagaagacattcaactgttttaaaaggaattgcttctattgaaagggaaattcaaagaaagtcacctactggccgtcagattgctaatacacttaatttacttgaacgtactaacattcatttaaattgaatagat

SEQ ID NO: 1448 - DNA, 200 bp, Lawsonia intracellularis
aactgtatataagatagcgatagttattaactagctatttgagttgcttgcatttttaatgcttctgtttgtgcatgagtactaagagcatctataaattcttgaatttcaccttccataacctttataaggctataaagtgttagattaatacgatgatcagtaactcgtccttgagggaaattatatgtacggattcg

SEQ ID NO: 1449 - DNA, 200 bp, Lawsonia intracellularis
ttctgaacgatcaccagatcctacaagagcacgtctagcatcagcttgttcaatttcttgttgttcctgttttatttgtaacaaccgggaagagagaacctttagtgcttttgctttatttttatgttgagatttttcatcttggcaggtgactacaatacctgttggtatatgggtaacacgtactgcagagtctgtag

SEQ ID NO: 1450 - DNA, 200 bp, Lawsonia intracellularis
tattaacactttggcctccagggcctgatgagcgaaaaacatcaaatcgtaactcttcaggacgaatttcaatatctacatcttctgcttctggtaatacagcaacagttgctgcagaagtatggatacgtccctgagactctgttgtaggtactcgctggacacgatgtgttccagattcaaattttagacgactatat

SEQ ID NO: 1451 - DNA, 200 bp, Lawsonia intracellularis
acgttgtctccttgaataagtgcaataatttctttaaatccaccagtatcagaatcactttgactcataatttctactttccaatgcattttttcagcatagcggcaatacattcgaaaaaggtcagctgcaaatagtgctgcttcttcacctcctgtaccagcacgaatttccagaagaatgtttttttcatctagtgg

SEQ ID NO: 1452 - DNA, 200 bp, Lawsonia intracellularis
atctttaggtaatagtaatatttttagctcatattcaagatgagttaactctaattcaagtttttttatttcttcaagtgccatttcttgaatatcaggatcaatatcactaataagttctttgttttcactaagctgttgttggagttttttaaactgttgaaaagtagtgactataggttttaagtcagaatgtgttt

SEQ ID NO: 1453 - DNA, 200 bp, Lawsonia intracellularis
ttgttagttttcgatattgttcttgatcattaaaaatattaggttgagcaagactacattcaatttctataaatttttgttctagattttcaagtttggcaaacataatttttcacatgttagaagaaagagatggttgtattaggtataattaatacagtgtgttgccatattaatttttattaatctatcgtattaat

SEQ ID NO: 1454 - DNA, 200 bp, Lawsonia intracellularis
actcataattattaagataggaaatagttttacttgtagagaaatgggttattagaataggtaactatataaatttcctgccactctgtgtagtagcaggaatatactactgttaattgttttgtttattgtgttgagcatattttttacggaagcgatcaattctaccagctgtatcaataaaacgttgttttcctgta

SEQ ID NO: 1455 - DNA, 200 bp, Lawsonia intracellularis
aaaaaaggatggcaagaggaacaaatttcaacctgcacattttcacctttggtagaaagggcttctatactaaagccacaagcacaagtaatagttgctttataaacttgaggatgaatatcttttttcatagagtacacctttcagattttgaacaaatatacatatactattttgttatgactagcaagctaatattt

SEQ ID NO: 1456 - DNA, 200 bp, Lawsonia intracellularis
atgtgttatattatcactatatatttttataaataataagatgagaagaaagaatggccaaacataaagtacgtgctgatgaacttgtttttttacaagggttagcagaaagtcgtgaacaagctaaacgacttattatggcaggtaaggttacattaactaataattctacaactataccattacgtttggaaaaacca

SEQ ID NO: 1457 - DNA, 200 bp, Lawsonia intracellularis
ggacataaatatccattagaaagtatctgcagtttaataggggtagaacgttttgtgagtagaggagcatataagctattaactgctctagatttttttaaaattgatgtaaaaagttgtatttgtcttgatgcaggcgcatctactggtgggtttacagattgtcttttacaacatggagcatctaaagtatatgcgat

SEQ ID NO: 1458 - DNA, 200 bp, Lawsonia intracellularis
tgatgtaggcaaaggtcaattacatgagaaactgtatactaatgaacaagttataaatattgagggagtgaatttacgtacagcatctaaagatcttattcctgaagaagtagatattttaactattgatgtttcttttatatcgcttactttgattttaccgtcatgtatacgttggctaaaggcttccggaattatta

SEQ ID NO: 1459 - DNA, 200 bp, Lawsonia intracellularis
ttgccttaataaagcctcaatttgaattatatccagataaaataaaaaaaggtgtagtaaaagaaactagcttgcaatatgaagcagtagaaaaaattattcatttttgtcaatcagaacttggacttatatttattggtgttgttccgtcggtaataaaaggtccaaaaggaaatcaagaatatcttatttacttgaaa

SEQ ID NO: 1460 - DNA, 200 bp, Lawsonia intracellularis
aaacgttaataatacttattataatttgtattctatattatgtaggtatataaatataaagaggtatgattatttattcatttaaggaagagaaataggtctactcctcttccttttttacaacaataatttttaactagtttggtataacaccacaagctatacgagcaccaccaccgccaagaggaagaggtttatct

SEQ ID NO: 1461 - DNA, 200 bp, Lawsonia intracellularis
gaatagttatcaccaccagcatggatcataactgtacgacccttaatttctttaactgttaatcttggagctaagagtgtttcttttgctattccatcagctttaactacaagtctaggtaagtctcccttgtgtccattaccaagaggtccttcatgttttcctgttttgtcaggatcataatgaccatgagcttggag

SEQ ID NO: 1462 - DNA, 200 bp, Lawsonia intracellularis
tccagctgttagatgtccatcatgctcagcaggtccacatgatcctccttcatggatatgaaaaccatgttctcctgcaggaaggcctttaagatcagtttttatttgtagacctttatctgtatcagtaaaagttactgtgcctatactctgttttattccattgtcatcaatcatatggacttctgaagtaacagaac

SEQ ID NO: 1463 - DNA, 200 bp, Lawsonia intracellularis
atgctaatactacactagtaatactagttaagagagaaatagttactattgaagtaacaaaaaatagttttattttcataataaggaattcctttttaataacaaattgtattatataattattacattaacatcctcatatcattgtataaaaaaagagaggtatctggcaagtattacttatttattttattgaaatt

SEQ ID NO: 1464 - DNA, 200 bp, Lawsonia intracellularis
ttttgaaaaattatttttttcttacttattaatttttatagataaactcaagagaacagatttattttatattttaactactttttttgagaggtttatactttggttaattgaagttttttctataatgtataattatcttatgatacactatacccttttttatttcccatatattttggatcttcatgttattattc

SEQ ID NO: 1465 - DNA, 200 bp, Lawsonia intracellularis
attttatattataatataatgttataaaattgattttttatcgatacttagtttagttaactatctaaaaaataaagacttaatttctagttaaaattaatatagatggcttcttgcaatattttttatgttaaatatagattacataaattaaatttaattattactatgaaattattcttttaagctaaaaatagcta

SEQ ID NO: 1466 - DNA, 200 bp, Lawsonia intracellularis
taactcattattttttaatgataatttttatttatttctataattaagaaaaaagtttttgttttaatggcacaaatagtatatacaacctaacgacatgtgtatgttatacatatggatacttttataataaaatggagaaaaagaaatgagtgataaaggcaagacaggtggatctatgccggaagaagattttacag

SEQ ID NO: 1467 - DNA, 200 bp, Lawsonia intracellularis
gctggcgtgctatcctttggccagtatataattttgagttaaaaaagtttttgccaatgggtttaatgatgttatgtatcttatttatctacaggttagtccgtgatataaaagatacattaatggttagtcaggcaacaggcggtggtgctgaaactttaggttttcttaaactttggggtgtaactccttcagctatt

SEQ ID NO: 1468 - DNA, 200 bp, Lawsonia intracellularis
ttatttatgataatctttgttaagcttgctaataaattaagtaaagcaaacttattttatacaatagtaagctttttccttggattttttgttctatttggcttggtaatttatccactgacagaatactttcatatgagttatgaaactatttctcaccttcagactacaatgccaagattatattgggtatggccaat

SEQ ID NO: 1469 - DNA, 200 bp, Lawsonia intracellularis
tataggtaattggagctatgcaattttttatattctttcagaactttggggtagtgtagtattatcagctctattttggcaatttgcaaatgaaattacaaaaattagtgaagcaaaaagattttatagtctttttggttttgttgggaactttggactattagcttctggttctataattattatttgtgctaatatag

SEQ ID NO: 1470 - DNA, 200 bp, Lawsonia intracellularis
caaaaaatagtgctgtagacggaacaatagatgtatttggagaaagtttaaagtatcaaatgttagctgttctgttttttggtcttctattactttatttgtatagatggatgaacaaaaatgttttaacagatccaaagctttatacacctggagctggttcaaagaaaaaatctaaaccaaaactagggttaattgaa

SEQ ID NO: 1471 - DNA, 200 bp, Lawsonia intracellularis
agtacaaaatgtattttaacttcaagatatcttttaatgatatcggcactagtcattggttatggaatttctattaatcttgttgaaggagtctggaagggacaaataaaactactgtatcctgacccaaatgattttaatgtcttaatgggtaaactggctctaacaacaggttttgttacaattattatcatgttaat

SEQ ID NO: 1472 - DNA, 200 bp, Lawsonia intracellularis
tggagctaatattttaagacgtttttcatggagaacagcagctctcattactccaatatttttaatggcaacaagtgttattttctttggcgtcattatttatgagaataagatgggtcttgatgctaccttatggggatttggtgttttgctacttgctgttgtagttggtttaatgcagaatgctttttcgaaaggtg

SEQ ID NO: 1473 - DNA, 200 bp, Lawsonia intracellularis
taaagtattctctttttgatgctacaaaacaaatggcttatattcctcttgatcctgaattaaaagttaaaggtcaggcagctgttgaaattcttgctggaagacttgggaagtcaggtggagctgcaattcaatctattatgcttctaattataggtggaaatgtaactttagcaagtcaagtagagttcttaggatca

SEQ ID NO: 1474 - DNA, 200 bp, Lawsonia intracellularis
gctgtactagtagtagttgctttttggattatttctgtatttggtttaagcaaacaatttgaaacattacagtctgagcaacaagctgaagaggctaatagtaaagaaaataaagaagttaaagatggtgagctctgcacaaactaagaatataaagaacatcaattaacttaatagaaggagttaggttaataacaggt

SEQ ID NO: 1475 - DNA, 200 bp, Lawsonia intracellularis
tataacataatgttatatgcttattctatgagttaatgattttttgattttgtaacctagcactctacctctacttagggtatggtgctaggttatttattatttaactattttattcaatatttttactataatactagttgaataaccgcttaaagaaattgctttattctttaagagcaaccatgggagatatagga

SEQ ID NO: 1476 - DNA, 200 bp, Lawsonia intracellularis
agaagtccaaaaataactaagagcaattaatatgcaaggttaatattagctttgggtttcttctttatacagaaaaagtatagttagctagttattgtttaataaattactataatttttgatacatactctagtgaagtattatatgttacagtaaatatgaaaaaagtaaataaagttaaataattagttgtattatc

SEQ ID NO: 1477 - DNA, 200 bp, Lawsonia intracellularis
ttaacaagatgaggagaagatataaagtaactattcaacttgtatatttttatatattatttatttaagaaagcttaaactcttctaagctcataaccttagattttaatggtagatttaagacaaatgtatcattatcgttatagagagctaagtgataacgtagatgtttgtcttctattttatgatttagatatgga

SEQ ID NO: 1478 - DNA, 200 bp, Lawsonia intracellularis
acaatatttgttaatttctcaaaaggtattgcaaaaatataatctttatccatcattgcaataataaaatacccttcatttgctgattgcaaaaagttttccatatagaaatggtaaacaacccagtatgcaagctttttttcatagtatctcctagaaaatgttataacagcacgtatacttttatctgacgattcaaa

SEQ ID NO: 1479 - DNA, 200 bp, Lawsonia intracellularis
ttatgttcttctatacttaataaaaattgtatttttatttttagctaaaatagtaatagcttgctgacgtttctcttcaatcaactctataggtgtacgattggttattctttctttttttaatacagtatctattggattactagtagtttcagctggttgttgacaaggttcattaattaaatcagtatctgactgtg

SEQ ID NO: 1480 - DNA, 200 bp, Lawsonia intracellularis
aattattaaattcttgttgtattatttcattttcaacacttttttctgcatcttcaatactaagaaagacaacatcaactaatctatcaagccttgtatattctataggttcaataagagctcgtattttttccaatgtatttatatcttgtgtcttctctttaataaaaacaaggctaagaagagcttctatactaata

SEQ ID NO: 1481 - DNA, 200 bp, Lawsonia intracellularis
agacgagcatcccatgcatagcgagatcccctaatttgtgcttctaaactatttgaatcatccctaccaacgacaaatagtaccattgcatcttgtgatacattattagtagtaatacattgttttttatacgaaaaaacttgatcaagccgtatattataataatctgttgtttttacttcaataataatatcccgtga

SEQ ID NO: 1482 - DNA, 200 bp, Lawsonia intracellularis
cccatctattttccaaattccatcaaaaccaatagcgtttttttttacctctataaagaccatttttgacattatatccaagtcgtcttccaagttcatttgtaatatcttgtaatacaaagcctgaattatcaaaggatgattctaaacagtctttaatataaagagagaaatattttgtttgaattttagataaaaat

SEQ ID NO: 1483 - DNA, 200 bp, Lawsonia intracellularis
tgtcgtagctctagtgatgttgtattgttatcctttaagttaccatctccagccatagtaacaatttgtttgatactcatagagagtacattactggaattaccttcataaagattgagtaatgccattcattaatacctctatttagttgtattttatacctaaatacgattaataataatctatgattatttctaata

SEQ ID NO: 1484 - DNA, 200 bp, Lawsonia intracellularis
aatactatttaaattttaatagttctggaatttaaatacaattttgactatagttataaatactatgtagtgtggtttttgtatatgtattagtagttaactttgttaaatgtagtcatatttctatagctaattccttgtcatccctaaatatagtgataatttcaccactatgatattaatattaatatgtatatgaa

SEQ ID NO: 1485 - DNA, 200 bp, Lawsonia intracellularis
gaaagtatgggtgagggagtattataaatagatatctttttgagggagtatctttgacttattgatagaaaaaatactaatcaatgatagtggttagtaaaagaaatgtaaaataagaggataaaaagggtttgtataataaattgaagtaactggtgcggctgaagagattcgaactcctgacctacaggttcgtagcc

SEQ ID NO: 1486 - DNA, 200 bp, Lawsonia intracellularis
tgttgctctatccagctgagctacagccgcatctgaaatggcttctaccttgtgaaggacataacgtcaaccttttttatgatttttatccaccatttttacagcttttgtccaatttttatgttttttataattaaattcaataggttaatctagagtgtctattatattttattgtattctttttataagagatgtta

SEQ ID NO: 1487 - DNA, 200 bp, Lawsonia intracellularis
gtatttaatcaaaaccttataactgtaaggcattatgatatgcaaggtatatatgtgtaaccagtctatttaacacaagtgtagggttgaccataatatgtagagctgattcactttgtgaaagtatatcttgtaaattaagaaaatctacaggagataatatagataaacattctacaagttgattttttctttgtttt

SEQ ID NO: 1488 - DNA, 200 bp, Lawsonia intracellularis
tttagtgataaaacaattgtttttctgattaatgaaataatatgttgtactaatgaggcttcgactacatttttatttgtggtaaaattaaaccaatttttaccagttattaaaaaagtagtaagtttttcttcccattcttctattagctctgaggaggatgaagtcattactgacgtccatggaagtgttattgtcca

SEQ ID NO: 1489 - DNA, 200 bp, Lawsonia intracellularis
agatctagaaacaagtgttggtaaaagttgttctctttgtggtacaagtagcaaacaacaagtttgtggatgtggttcctctagtgatttaagtagtgcattagcagcctcagtacggagatgttgagcttcagcaagtatgacaacttttttcccattactatgggcaggctctccaaaaactgttcgtaatttacgga

SEQ ID NO: 1490 - DNA, 200 bp, Lawsonia intracellularis
tgtcatcaatttttatacttccttctgctccatgtaataagaaaagatcatggaaaagctttgctccaatttgtaagcaagttggacaagttaaacaaggtgttccatatatacaatttagtcgagcagcataccaaagggcaatagaaaatcgttcatctaatgttccaccttcaataataagtgcctgtggaggatta

SEQ ID NO: 1491 - DNA, 200 bp, Lawsonia intracellularis
ctagctatattatttagtaatattctaacattatgctgagtttgggctgttgctaaagtaaatgcttctgttgcttgttgttgtgttggtagatcagagtttattttctgtttggctgtggacatagtaaaatgattattccaatgtaatattatatgtcttatgctgaatagcagttacaatagagttaatatatgttt

SEQ ID NO: 1492 - DNA, 200 bp, Lawsonia intracellularis
catgagatgtaagataaaaagatagggcacgagcaaaatttttacccatgtatccatctataaagagttgactgacttcttggacaagcagaagcacattctgacctttagcaaggataattttttcttctcttgtcattgtattcagtatggaacgaaatgtttgttgtgcataaggttgatacatccaaaaatacata

SEQ ID NO: 1493 - DNA, 200 bp, Lawsonia intracellularis
aagtctaatgcattaataatactttctctttgtaattcaggagcttcttttgaagtaattttgaatagttcataaggctttgaaagtagaaataatatatctagatcaggaaagcgtaattctaactttgtataccaattaaaaaaatgttctaatttggttttataatcccaagagcgaagtcgatagttattattttt

SEQ ID NO: 1494 - DNA, 200 bp, Lawsonia intracellularis
atctgcaaatccttcaataacaccagcaacagtatcagaggcagatttagaaataattgcagcacctggttgaagaactgctaaaggatttgcaatattaaaaagtaacagtgattctataaggatatcattataaagaatggagagtggaactgcaaaaatacttctaaataaattaccaataatagcttctttaggaa

SEQ ID NO: 1495 - DNA, 200 bp, Lawsonia intracellularis
agcctctaagaatattgtgtccagctatatataggctattacaaatagctatcactgtaaatacaatgatgtaatgattacttaacgtgaacccaaaagttttttgtaggattaagtcatgaataataagttcaagcaaaacaacagataagcctgtatacattaatgaatcacaaattctactccaacttataaagttt

SEQ ID NO: 1496 - DNA, 200 bp, Lawsonia intracellularis
ttccagcggagtaaagaagtttttgagaagcttccaccacctagtattgcttgggcgatattacgtattcctgttataacaaaccaaatagttgaaccaaaccatgcaagtacccaccactcttgagtatagaggaaagctagtgttgcaggaacaaaacctataataatttttaacagatttgcacattttgtattgag

SEQ ID NO: 1497 - DNA, 200 bp, Lawsonia intracellularis
ataggtgatatttggccatgaatttgtttgtttttttttatcaatttttctaaggtaaataccattatctggtaaagagcctattccacccattgcaatgatattaccatagggtttaatttttatattagcaagtgcttgccattcttcttttttttgtctgccaagcattctgaggccaggtagttttctaagaaaag

SEQ ID NO: 1498 - DNA, 200 bp, Lawsonia intracellularis
aaagaattttataattaattccttcagtatttgtagtaactatccaagttttttggaaagctaatggtacatgaacaggaaggatcataggattgaataattgtttttttgctaaaactcttcttgaacttgcaggtaatgtttgtggtgctgcaagacccataccatgtcgtaaatttgagttacttgttgagtctgta

SEQ ID NO: 1499 - DNA, 200 bp, Lawsonia intracellularis
ccaatacgactacgtagaggacttatcttataaggagcttgtaatattggtaagttacgcaaaataactataaattttttataacgcttgtaacttgcctctgtatttaacaattctaatcttcgaatcatacttacaagaagctgtttaagacgtaatatatttggatcattaattgctaattgaagttcattaattgc

SEQ ID NO: 1500 - DNA, 200 bp, Lawsonia intracellularis
agctaaatgaataagatgtccttgttgccattctttaaggttaaaaagttctaaatgagtgatcattcctttacagtcccataagagttcaaggacatcttcagctgttaattttgcaagttgtagtgttatacgatatccacttcttaggctagatacatatttaagcaaattatagggggataattttaaaagttctg

SEQ ID NO: 1501 - DNA, 200 bp, Lawsonia intracellularis
gcagttgagtgggatggtcaggagtaaagaggttagcaatttcaggattgttatcaggtgtgatccaccgttcactaattgattcaatagttatcatattcattttatgaatatgatgcgtaatttgttctacctgctcaggagttgctattagcatttctttttttaaagctgatgttttttcatataaaagtggtaaa

SEQ ID NO: 1502 - DNA, 200 bp, Lawsonia intracellularis
agttgtttatggatacactcagtaagatgtaatagagatgtctgtccttgtcctacaaatgcaaggaattcttgtggctgaatttcaggtataataatttctaattcattagcaagttctaagcgatattttgtgttccaaatatttagtacagttaatacgttttgttgcatccattgagaaacttgttttcctttttc

SEQ ID NO: 1503 - DNA, 200 bp, Lawsonia intracellularis
catgagttcatacacaggtttttctgctaaaaacgtaagaaaactttcaggatctgaaaaaccacgaggagcccaaacaactcttataaaacgattgtggaaaggaatttgaaattctataccaatacggacgataatacctacaatacttgctgcttgtaatacttcccgagcgatttctggctccacataattatagt

SEQ ID NO: 1504 - DNA, 200 bp, Lawsonia intracellularis
aaacaactgtgagtttacggatacctttaacccatgcatccataataagatgtgttgcattttttcgtccttttgtgtttgaatcatgcacatggtgatccatagttagttgattccacttttctggcatttctaataagtggtgtttagtaagcatttttcttactatatttggattcccttcagcagttcgtctaaag

SEQ ID NO: 1505 - DNA, 200 bp, Lawsonia intracellularis
tcatgcacaagtttaagttggtgactttcatcatgtctagagcggacgatatctttcataatttggataagtacacgaccagtattatagcgaaaggttgtacgagcactatgtagaacttcatcgtgtaatgcttggagggcatatagcctatcttttgctttacctttttcaatattagttaagaggttaataacagc

SEQ ID NO: 1506 - DNA, 200 bp, Lawsonia intracellularis
atgggctacacgaaattctcttgttgttgtaagttcaaggataccatgtggatgaaggttaatatcaattgttggctgttgttttatatcagagtggatattatcaagggtgtcgtttatcatccgaaggagttcacggtcttggcggtcaaaaaaaatagaagggatcatttatgctatcctaaataatattgtaacta

SEQ ID NO: 1507 - DNA, 200 bp, Lawsonia intracellularis
actgatagattgtatcttatctaacaatatgtagatcgtctatatgtcaggataatatatagtttgatagtaggtttaattaaatattttttattttcttcttataaagaagaatttttattatagctgatataaaaaataattattttactttaaaataaagtagaaggaatatatgtaactattttttatagcaagat

SEQ ID NO: 1508 - DNA, 200 bp, Lawsonia intracellularis
aaaataatttttattcattacataataagttatatttctatctagtatatagtataactagttatcatttatttaattgtgataactaataattgttataaattatatcttaataataaaaaagaatagtttaactatagtatttcatttataaaatttttagcttagcttatagtttataatagttaataataaattga

SEQ ID NO: 1509 - DNA, 200 bp, Lawsonia intracellularis
tagttagtagtatgtaatttatctatgtaatttgtttgctttttatagtatctaccttgtttttttattaaataatagtatgttataaaatttctgtattatttttctttttacattgacattactgttttagtaatgcatagttgtctttgaggtgccgtattatgttcaagtgtattgaactttcaatgatacgggaa

SEQ ID NO: 1510 - DNA, 200 bp, Lawsonia intracellularis
tgaggttttttttgagaggtttttttcatggctaagtctatttatgttggtaatcttccctggtctgctacagaagaacaagttcaaagtcttttttctgagtatggtcatgtaatggctgtaaaacttgtaagtgatcgtgaaacaggtcgtgcacgtggttttggttttgttgaaatggaggagcctggtgctacagc

SEQ ID NO: 1511 - DNA, 200 bp, Lawsonia intracellularis
tgctattgaagccctagataatgcaaattttggtgggcgtactttgcgtgtaaatgaggcaaaacctcgagcaccccgagcaccacgttactagtttttacataaaaaaagaacctctagaattctagcggttctttttttatgtaaaaactagtaacgtggtgctaacttagtagttagcctaacttagtttattatta

SEQ ID NO: 1512 - DNA, 200 bp, Lawsonia intracellularis
ttattatataaaaataactgatagcagttaattaggttggagtagatggattaacttttcttcatatacttatatatcaaattattttatccaaaaactattcttatctaattttgctttttaaatttttcttctattgattacgtatgttttttgcttgtgaaaaacatgtttttatttaagataggttgtcaagttta

SEQ ID NO: 1513 - DNA, 200 bp, Lawsonia intracellularis
ttccactcatttattttttccttaataaatagaataattttttcgtgttcatttttccctgttcctgatacataaataggagcaccaaatgagaaatgaatagttttttgaggattgattggtccaaagtcctttatcaatttcccttcaccccaagcatctgttttaagagctaaagggataactggcactccagtacg

SEQ ID NO: 1514 - DNA, 200 bp, Lawsonia intracellularis
tcgtgcaagttttacacctatgctattaaatttttcagggagaaaggtatgtgatcgagtactttgaggaaaaataataagagaggttccactgttgaggtgatttgaaccttcctcaagtacttttgagaaatctacccttgggttttggcgctttataataataggatttcttgaagataaaatttttccaaaaaatg

SEQ ID NO: 1515 - DNA, 200 bp, Lawsonia intracellularis
gataactaattaaactttttttcacaataaaagtaacaggtttgtatggctgaattattgaaggaagaacaaatgtttctagtgtactcatgtgattacctataataatgcaaggggagttattattatgtatatgttctaatccttcaatattgaattgacagccaaccttttctaaaacactaaaaacttctttactt

SEQ ID NO: 1516 - DNA, 200 bp, Lawsonia intracellularis
gattgaacccatgattcagaagtatattttttaaaataagctttgataccacctttggtaatgatccataatattggaagataaccaatattagggaattgttgtataaattttggaatagacttttgaggagtcttatatgaagattggctaaatggtgtgagagatttaatcattttgggctctcttctggtatagag

SEQ ID NO: 1517 - DNA, 200 bp, Lawsonia intracellularis
tatttcttctttatatggttatgccacatatttaacttaggttcttctccctgttcttttgggtagtaaaaactgcggttactaatggttgatgggaagtattcttgttcaacccaggcatttggatagttatgaggatatttatattctctaccatatccccattgcttttgtagttgagtagaaggattacgaaggtg

SEQ ID NO: 1518 - DNA, 200 bp, Lawsonia intracellularis
taatgggacaggttgtgccccatgaagtcgaacttctcttgcggcattactataagcagcataagttgagttactctttcgggctaatgctaagtatacaactgtttctgaaagaggtatgaatccttctggcataccaacaaactctacagcttgttggcaggatacagctaaggataatgcttgagggtctgctaatc

SEQ ID NO: 1519 - DNA, 200 bp, Lawsonia intracellularis
ctatatcttctgatgcagatataataagtcttctacagataaatcttggatcttccccaccttccaataaacatgcaaggtaatatagtgcagcatcaggattacttcctctaatagacttaataagagcagatgcatattcgtaatgactatctccatctttatcatgtctttcaaggatttcaggtaggtttatctta

SEQ ID NO: 1520 - DNA, 200 bp, Lawsonia intracellularis
atatattcaagtactcttttttcttcaggcagtattgatatatattcaataagattaaatagtgttcgtgcatcaccatgtgcggtagtggcaaggaaatttataacatcatctggtaatagtatgttgagaaaaagagttccttttttaacaagttcttttaattcattgtatcctaattgtcgtagttggagaacatt

SEQ ID NO: 1521 - DNA, 200 bp, Lawsonia intracellularis
taagcgtgatagaagctgttttgttacactaaatgatggattttctgttgttgtagcaagcattgttagtttacctgattcaagtaaaggtaaaaagaagtcttgctgagctttagaaaaacgatgtatctcatctaaaataagaatatcaatatcagtaagcttctggcgtaattgttgtatccctgtttctggtgcgc

SEQ ID NO: 1522 - DNA, 200 bp, Lawsonia intracellularis
taatacgaagaatatttgtactttttttatatgctaatagtaaggctaaagtagacttaccacaaccaggtggaccaaagaaaaggaggcttggcaaacgtggggcagatataatgtactgtaatcgttctaatagatgattttgtccaataaaagtatctaagttatttggtcgtaacttttcagataatggtgtaaga

SEQ ID NO: 1523 - DNA, 200 bp, Lawsonia intracellularis
gacataatagctccatattctaaaatagaaagaaaattaggttattctagtaacactgcatcttctccatcaatttcttttacaagtacattaatagtatgttggcttgttatattagtggtgtaacctatatagtcaggttgaataggaagttctctaccacctcgatcgataagtgtaaggagtttgacatgggtagg

SEQ ID NO: 1524 - DNA, 200 bp, Lawsonia intracellularis
acgtccatagttgttaagtgcttctaaagcagctcgtattgtacggccagtatatattacgtcatctataagaataactgttttatcgtcaagaatagtaggaataaatgattctccgatgatgggatggagttgacgtgttgtccagtcatctctatagaaattaatgtctagggtgccaataagtggagattgttttg

SEQ ID NO: 1525 - DNA, 200 bp, Lawsonia intracellularis
ttttctctacaataactttttgtagacggttagctaaaattacaccacgacgttgaataccaataaatagtatattatcaaatgttatatagttgtctataagttcttgagacaggttaactatagctgtttcaaattgatttatagtaaaaattatttttctatccatggttatccttttttacatacaaatacacaaa

SEQ ID NO: 1526 - DNA, 200 bp, Lawsonia intracellularis
attttttcttatgggaagttttacaatatacataactttggataaaaacagttgtagcaatttatagtctatttattatgtcagatagttactatctattataaatatattatcatttcttaaagtctgtaaagaaagattaatagtagtgagttatgataatatgtcaaatagtaaataaaatcctaatagtaaaaagt

SEQ ID NO: 1527 - DNA, 200 bp, Lawsonia intracellularis
agtaataccttatgatagctaaaaaaaatacctcttttggagagatagaattaccttggtctaattataaaacattttatcttgctcatgaacattggcaagagccttatatattaaataaaaaagaatcgcatcatcttttgcatgtattgcggattcaaataggtacagagattcatgtattagatggaaggggaaga

SEQ ID NO: 1528 - DNA, 200 bp, Lawsonia intracellularis
gaaggattattttctgttaaagaagtaataaaagatagagtaagtctctcttacattaatgactggatgcatcctgaacccacaagaaaagttgttcttgcagcaggatggacaaaagcagcaagaagagggtggttatttgaaaaagctgctgaacttgaagcatgggctatttggttttggaaagctgagaggagtca

SEQ ID NO: 1529 - DNA, 200 bp, Lawsonia intracellularis
atttccattatctgaagctaaaaaagaatcttggcaaggtcagattattgcaggagcaaaacaatgtaacaatccgtggtttccttcattacaattatttccaaatggtatagaagaacttatttataatgtagatacaataggttgtgattttcggcatgtattagttgaaaatacttgtggaccagcacaacctctta

SEQ ID NO: 1530 - DNA, 200 bp, Lawsonia intracellularis
cattagatatgcttaagcaaactggtttaactatttgtgtccttgggccagaaggtggttttacacataaagaaatcctaaaactaaaggaagcatcatttttgtcgttgacactaggagatagagtattaaggtgggaaactgcagctatcctttgtcttggattgcattggtggaaaaaagtatattcctaattaata

SEQ ID NO: 1531 - DNA, 200 bp, Lawsonia intracellularis
ctttgttacttgttagctttttctccaatgtaaaggtgtacaatacctgaagataagggagtataataagcttgatgaaagcctgctgcacggatttcatcaagtaattcatcaggatgagggaaatccataatactttgttttaaatagagatatgctgaagggtcactcgagagtttgccaataaatggtaatatttt

SEQ ID NO: 1532 - DNA, 200 bp, Lawsonia intracellularis
tgtaaggtaataattatataatcccatccaaatacgttgttttcctgttccaaattcaagtatagccatgcgtcctccagggagtaggactctcgcaatttcagagaaagcctttgtacgagggacaatattacggataccaaaggctaatgttactccatctatacaagaatcaggaaacggtaaaagttttgcgtctg

SEQ ID NO: 1533 - DNA, 200 bp, Lawsonia intracellularis
ctgttattggccatactcttgtaatattagctctatggagttttttcattccttgatatagcatagaaaagcagagatctacagcagaaatatgaagttgctcataccgattgtgtaatgcaatagccacatcaagtgttccagctgcaagatcaaggatacggcctgtttttccaggttccatagcttcaacaagacaa

SEQ ID NO: 1534 - DNA, 200 bp, Lawsonia intracellularis
tgacgccaataaatatctagtccaccacttaatattctattcataggatcataccatcttgatatgcgtccaaacatagaattaatagatctatcatgttgggttgtctctatatgtggattctgagacattttctttgtttcctatttaaaatattttagtaatagtaatctatagaaaaatatacataaacataatta

SEQ ID NO: 1535 - DNA, 200 bp, Lawsonia intracellularis
aatcaggatagtaaatagctcagagtaattgaggaatattagagtttttggacaacatattagaaactatattaagtaatttcatctttagctagatagagaatgtactaggataagttattttaaactgactataccctgtattctaacatggcatgttgttattgtgatgttgaccatgtcgttttctaattttcgta

SEQ ID NO: 1536 - DNA, 200 bp, Lawsonia intracellularis
tgtttcagtaccagtactaagagcacttacttcacatgtttcatcaaaaggttctgtaccaagatctccttcaagttttgagacaactaaagctccaacagcatcaccaaaggtgtttacagctgttcttatcatatctagtatccgatcaattccagcaataagtgttacagcttctaatgggattcctacttgtgtga

SEQ ID NO: 1537 - DNA, 200 bp, Lawsonia intracellularis
atacaagtgtaatcataataagtccagcaccagggacgcctgcagtacctatagaagcaagtagaccagtgagaacaaccataagttgtttttcaaaccctaggggtatgccatatatctcagaagcaaatatagctgcaactcccatgtaaatagctgtgccatccatgtttatagtatttcctaatggtatagaaaag

SEQ ID NO: 1538 - DNA, 200 bp, Lawsonia intracellularis
ctagatatgcctttagatgcaccaagagatcttacagcttgcaaatttgttggtaatactgctgcacttgagcaagttgtaaagccaataaatgtaggttccataagacgtttaaatacagccattactggtagacctgtagctttaataagaggaacataacataataatacatgtgcaatagatgctaagtaagctat

SEQ ID NO: 1539 - DNA, 200 bp, Lawsonia intracellularis
aagcataaatttacttaaaggtaacagaacatcaacaccatgtgtgctaattgtatatgaaattaagccaaagacaccaattggtgcatacatcatgacaatatttgtcatgcgaaccattgtatctccaataagctcaaaacttctcaatagaggtttcccaacttcaccaagagaactaagggcaaaaccaaacataa

SEQ ID NO: 1540 - DNA, 200 bp, Lawsonia intracellularis
ctgcaaagaaaataacttgaagcatgttaccattggccaaagcttctattggattaagaggtacaatattaataattgtttgaataacacttggtggttcaaccatatctgattgtgtagtagctatagaaagattaaaaccaactcctggttgaaagaaatttgcaaatataagaccaatagtgatagcaatagccgta

SEQ ID NO: 1541 - DNA, 200 bp, Lawsonia intracellularis
gttgcaaagtagtaaataagtgttttagtcgcaactcgaccaagtttattgatgtcgtgaataccagctgcgcctgcaacaatagtagcaagaacaagtggtacaactaccattcgaataagcgttatgaataattgaccaagtggacgtaaatagtttgatgtgatctcttcagataagaaaataccagccataatacc

SEQ ID NO: 1542 - DNA, 200 bp, Lawsonia intracellularis
aagaaaaaatccaataatcatttggacaggcaaacttattttcgacttagcacttgtcatatattctccataagcaatcttcgctaaccatattaatatgatagctactaaagctattttttacttttatttcattaagcagtgtaaattgttcttatttgaaggtcaagttttatgactgtactaagtagttatgtata

SEQ ID NO: 1543 - DNA, 200 bp, Lawsonia intracellularis
tttttataataaaaatatgatgttgttataaaaataacaaatgttattttactatttaaaagttagtcgttgctatctactttttatttatacagttaataataaaccataaaataaattattatgggatgtatatagtatgttaagttctatatgtatgagataaagagttattatgtagaattagattttttattacg

SEQ ID NO: 1544 - DNA, 200 bp, Lawsonia intracellularis
tattttttgtactaacccacttgttgaatgtccttcaagaaaaggaagacttaatacaagaccattattgcgctctacaaactctttacctataatttgttctacacaccaatcaccacctttaactagtacattaggttgaatagcttcaattaattgtaatggtgtatcttcttcaaaaccaataatgaaatctataa

SEQ ID NO: 1545 - DNA, 200 bp, Lawsonia intracellularis
gttcaagatgagctaatacaaaagcacgaatatggaaaggattaaatggtctatctggatcttttcctaaccgtttaacagagttatcagtatttaatccaagaaccagaatatctccatatgtttttgctctagtcagaagatcaagatgtccaggatgaagaatatcataacaaccgtttgtaaagataatttttttc

SEQ ID NO: 1546 - DNA, 200 bp, Lawsonia intracellularis
ccattacttttaagatattcaagttttggaagtaaatttgttagagtaacaattttgggatgtgttaatatttgattatacataatactttcactcatatttgcttgttactaacctactatttataaatagcttctcggacaagattcattgtatcttcagcttttatagttgctctttggttaccatcagttagcaga

SEQ ID NO: 1547 - DNA, 200 bp, Lawsonia intracellularis
tcatcaatgtagtttttgttctcataggttgcacgacgttcatgaaatggattaaggaattcttttaaactttgtaacaatatttttttacattctacgcatcctagtgttgctgttacacaaccttcacgaatttcatcttggatgtaaggagttgtaagaagttgatgataagggaaaaggttgcaaacatcagggtt

SEQ ID NO: 1548 - DNA, 200 bp, Lawsonia intracellularis
acctggatcactttttcttagtcttgctggatctgtatacatttttttgactttatgagtgacttcatcaaaagaatcattaagaaaaattgcatttccataacttttagacatcttacgtccatcaagtcctggacattttgcagtaggtgtgagctttgcttttggttcagcgaaaatagtgccatatagattattaa

SEQ ID NO: 1549 - DNA, 200 bp, Lawsonia intracellularis
atcgtctagcaatttcacgtgtaagttcaaggtgaggaagctgatcttgaccaacaggtactaactgtgggcgataaagaaggatgtctgctgccatgagaactggatatccaagaaatccaaaatttcccaaatcttttgtagtgatttcttgctgttgctctttatatgtaggattacgttctaaccaacttaaagga

SEQ ID NO: 1550 - DNA, 200 bp, Lawsonia intracellularis
gtgatcattccaagtagaagattaagttctgcatgttgtggaacttttgattgttgaaaaataatactttgatgtggatcaattccagatgcaagccagtcaataacaaggtcatatatgtattcttttaagtgggttgtattagcataatcacttgtaagtgcatgccaatctgctacaaaaaaaagtgcttctatttc

SEQ ID NO: 1551 - DNA, 200 bp, Lawsonia intracellularis
ttgctgcatagataaccaacttttgatagcaccaaaataatgacctaggtgtaacctccctgtgggacgcatcccagaaactgtacgtagtggcatagactgatgcattagagatggcctcctcaatcttaatttagtccaaataataaggtgcaaaggatgagcgatagattaataagtgggtataaaatatatcctag

SEQ ID NO: 1552 - DNA, 200 bp, Lawsonia intracellularis
taaaccagttaaaagaagagcaataaagataacaaaaccatatcgttctgctaacatatatttatagccaagttcattggggagtattgcccagaggattttactaccatcaagaggaggaatagggagtaaattaagccaagcaagagtaaaattgatgataataccacttgagaacataagaaaaaaataagtccata

SEQ ID NO: 1553 - DNA, 200 bp, Lawsonia intracellularis
cagaagactgctgccattcataagcagggaaaaattctagaaagattcgtaacaacaatccaaaggtaaaggctagaagaaagttagctgcagggcctgcaaaggatactaacatagtatctttacggagatcataaaaatttctagggttaataggaactggcttagcccaaccaaagataaatggacttgttaggcta

SEQ ID NO: 1554 - DNA, 200 bp, Lawsonia intracellularis
gttatagtaaagaccatgagtcctagtggatcaatatgatgagttgggttaagagtaattcttcctaacattgctgctgttggatctcctcgtcgttgtgcaacccatccatgtgcaacttcatgtaatatgattcctaagacaagaggaacaaaagctactgctattcgcttaatagcatttgtaatatcaaattcaaa

SEQ ID NO: 1555 - DNA, 200 bp, Lawsonia intracellularis
catagctattgtacctgtaaacgtaaaaatcgttttttaccaagtttgataatatagtcgccaggttcaaggggtaactcaacatcatgataacgtttatcattcactgtaagagaaccttgttttataaggcgttttgcttcactacgagaagtacataacttagagtcagtaagaaaagcaggtggcttacttgtttc

SEQ ID NO: 1556 - DNA, 200 bp, Lawsonia intracellularis
accatagttacatataaattcaggcgtatcatcaggaagagcaccattaacaaaaacagctgtaaattcttgcagtgcttcataagctttttctttgccatggtattgtgttacaatgtcaacagctaactgttcttttactttcttaggatggagatgtccttctttaacattttgttttaatttttctacttcagata

SEQ ID NO: 1557 - DNA, 200 bp, Lawsonia intracellularis
gactactagtagagataagttcataatatcgccacataagttcatcagagatagacataactttactaaattgaacataaggttgttcgtcaattccaacatagttaccataagattttgacatcttacggactccatcaagcccttctaatagtggcattgtaagaatacattgaggttcaatattatagtgtgacata

SEQ ID NO: 1558 - DNA, 200 bp, Lawsonia intracellularis
agtgtacgaccaactaataagttaaacttttgatctgtacctccaagctctatatcactttttagagccacagaatcatacccttgcatgagtgggtatagtaattcatgaagagctattggtgtattttctttatatctgttagaaaaatcatctcgttctaacatgcgtgcaagtgtataatgtgaagctagacgaat

SEQ ID NO: 1559 - DNA, 200 bp, Lawsonia intracellularis
aaagtctactgatgacatagacattagccatttagaattgaaaactacatttgttttaagaggatcaagaattttaaaaatttgttttttataagtttctgcattagcttgtacttgttcaactgttaatgctggtctagtagtggatcggccagaaggatctccaataagaccagtaaagtctccaataagaaaagtga

SEQ ID NO: 1560 - DNA, 200 bp, Lawsonia intracellularis
cattatgtccaagttgttgaaagtgtcgtaatttgtgaataagtacagtatgaccaagatgaagatctggagcagtgggatcaaagcctgcttttacaacaagaggtttttcattactaagttttttgcgtaatgattcttcatttataagttcaacataaccacgttttataagttgtagttgatcatcaatagatacc

SEQ ID NO: 1561 - DNA, 200 bp, Lawsonia intracellularis
atgtattaccaatattatgtatttaaagctaaggttaaagatactgttaattatatacagttcagttgttattaaaatatttcctcataatagctgatactactatgattactctaggtaagcaatatatttgtttttgattggttaccttatatatatatattaagaaataatagacttattgttagagataagatgtc

SEQ ID NO: 1562 - DNA, 200 bp, Lawsonia intracellularis
cttcacgatgtaatagccatgcttttattgagagtccttttttccccttaaaaccagttagatgattattaatccctataactcgatggcatggtacaacaagtggccatggatttttagacataatatttcctactgcacgtgctgcacgagggttaccagctaatgctgctagatctctataactaatagttgttcca

SEQ ID NO: 1563 - DNA, 200 bp, Lawsonia intracellularis
tacttaattgttgtaagggtaagtaagacttttttttgaaaagagttttttggaatagaattccaatttagaggtaatagatcccattgaacaagctttccttgttcataagacaataaaagatttttaacctgtttcccaatagttgtagtagggttaaatggattttttaaccaatcaatgtctatttgattaatcaa

SEQ ID NO: 1564 - DNA, 200 bp, Lawsonia intracellularis
attgtttactgaatagatagtgagggttagtatttctccagaaatatattcttgtataacttcatgttgtgatgatagtagcatatattttaactaacttgttgccaatggagtaaggtacaccttctccattgacttgtttttttattgtgttgtattgtattcagctattactttatttacttcttccatgaacacat

SEQ ID NO: 1565 - DNA, 200 bp, Lawsonia intracellularis
taagtaatttatcttgtccatgtacgctacggataacttttcctttagcaaaaataattcctttatcacgtcctccagcaatgccaatatctgcttcttttgcctctccaggtccattaacaacacatcccataacagctattttgagtggagttttttcattaacaaggcatgcttcaacatctttggtaagtcttata

SEQ ID NO: 1566 - DNA, 200 bp, Lawsonia intracellularis
agatcaatttctgctctaccacaagatgggcatgcaataatttctggacctcttcttcgtaacccaagagctcgaagtatctcccaagcaacagggacttcttctacaggatcttctgttaatgaaatacgaagagtatcaccaattccttctgaaagaagtattcctagtccaacagaagatttaacagtaccacgaat

SEQ ID NO: 1567 - DNA, 200 bp, Lawsonia intracellularis
aagacttcctgcctcagtaacaccaaggtgaagtggataatcacaagatttagaaagcattctataagcagcaatagtgtctaagacagaagaagatttgatggaaacttttatttcataaaatttttcatcttctaatatttttatgtgattaagagcactttcaaccatagcttcagggactggtcctccaaacttat

SEQ ID NO: 1568 - DNA, 200 bp, Lawsonia intracellularis
caataagatgtttttctacagatccactatttactccaattcgtatacttgctttatgggcttttgcagcatcaacaacagttacaactttttttcgttcaccaatatttccaggattgatacgaagtccttcaataccagattcaagtgctgttaaggctaggcgataatcaaaatgaatatctgcaataagtggcaat

SEQ ID NO: 1569 - DNA, 200 bp, Lawsonia intracellularis
ggagatgcgtcatgaatagcttttaatgcttttgctgcatttgcatctgggacagcaaggcgtacaatttcacatcctacagcatgtagttggtttatttgcttaagagtagcttctatgtcccttgtatcagtatttgtcatactttgaactataattggagcatcacccccaatagcaatatttccaatatagatctt

SEQ ID NO: 1570 - DNA, 200 bp, Lawsonia intracellularis
acgtgttttttttcttatattcatagtgtcaaaacctttagttgtaatgtagttaaaagcaatatgagtaaggtagggtagtaaattaaaaaaggataaagaattcttacttgtaactgatagtattcataatatgttttctttgctgttcaagggcaaccttttgttcttcaaaagatctaaatccagcttgatataaa

SEQ ID NO: 1571 - DNA, 200 bp, Lawsonia intracellularis
gcatcattaacagtttcttcccatggccatgtggcatagataacagctttatggaagagtgtccggaattcttttaaagttttagcaatttttggcgcttgactagtcgttagatttttttgtagctgtgtgcataaggttgaaatgttcttattataccataattgaatatcttgatttgtaggattggtattgaatag

SEQ ID NO: 1572 - DNA, 200 bp, Lawsonia intracellularis
attataaccatgttcttcaagtaattttttgagattgtttttatgttgtttggtgagccactggcccagttcagaaagagagatatttgaagcttcaatatcagcaatctcttgttttgtttgatagtatgtatcaggtacaacagatgcagaggtgataccactaatagttacaatacctcgtaaaatagcactgtttg

SEQ ID NO: 1573 - DNA, 200 bp, Lawsonia intracellularis
caacaccttgtccacagaatcctacttttttaccatatttttgacctgtaaaaatggtaaccaaaatagcccaaacaacagctggatcttcttcatcataaatatgagaaagagattgattatccctatctgtagcaagcaccatttgtgtcatgtcattggagccaatagagaatccgtcaaactcttgaatgaactgt

SEQ ID NO: 1574 - DNA, 200 bp, Lawsonia intracellularis
cgagcgagaatagcattagaaggaagttcagacataagaaaaatttgtaaattatcttcaccacttctgagattatgcacctcactaagataagagcgcatagagcgagcttgttcaattgttcttacaaatggaagcataagctggagatttttagcaccatatagagaacgagctgccttgaaggcatcaatttccca

SEQ ID NO: 1575 - DNA, 200 bp, Lawsonia intracellularis
gtcatgaatatcccgagcaactcctctgtagcctaacataggattatcttcaaagtcttcgaataatataccgccaagtaaatttctatattcatttgttttaaagtcagttgtgcgatagataataggctttccataaaaagccattgagaaaagcgcaagtccttgtgaaagtgtttggatataatgttcacgacctg

SEQ ID NO: 1576 - DNA, 200 bp, Lawsonia intracellularis
ttttatgtccacaagaacggataagggaaccaatagctagaggaatagattgtaattctttaatttttttattaataccacatcgctcacttacttctttccgaagttgctcaatttgacttattgtcttctgtactattggattttgagctatatcagcagtatacgtttctatttctttttcaaggtctatacgacgc

SEQ ID NO: 1577 - DNA, 200 bp, Lawsonia intracellularis
ttttttaactgaggagattcatcattaagcgatagaagctgcttttgataacccataataatttttacatgttcagagaggtcagaagaaactttaagggtatctagggaagatgctgctaattctgtaagttcatctagtcgtttttcaagttcttttatctgtctatatgttgctatgacggcttctggattatgtgg

SEQ ID NO: 1578 - DNA, 200 bp, Lawsonia intracellularis
atcatttcttttatgtagcctttcaagttcttctgtatatccagagatgtgtcctacatgttcacggaggtgtaaatctaagtttacaagtcctaaacaaagatgttcttgtatagttttacggagatgtacttcaagttcatctatttttttttggataatagattctaatgaaccattatcaaaagcttcaagtgctg

SEQ ID NO: 1579 - DNA, 200 bp, Lawsonia intracellularis
aaggatgaacaccaacgtttcctaacataaattcagcacgtaaaagacctacttcaaagtcagggacattacgtagacgtgataaaaagagtgattgacctatatctgctagtacaaggccaacttttgtttttgtctttggtaactcattgatatttatttctccacctgtttggtatagtggaagcagtccatggtaa

SEQ ID NO: 1580 - DNA, 200 bp, Lawsonia intracellularis
acatgaccacgtgtaccatcaacagttacttcaagaccatcaagagcttttaaagctgctgagttttgtatacctataatagcaggaatacctagttcacgtgatgtgatagcagcatggcttgtatctccacctacgtcagcaagaatggcagaagctacacgcataccagggaccatatcaggatcggtacgttctgc

SEQ ID NO: 1581 - DNA, 200 bp, Lawsonia intracellularis
tgctaggatatcacccttttgtattttatttagctcaagggctgaattaagaaagcgaactttaccttgtccggcacctcgagaagcaccatttccttcaagaacaatttttgctgttgcagcagcttgaggatcaacttcacaacgatgcataaagatagtgttaggatagagcataagctcatcgttccatcgtgttt

SEQ ID NO: 1582 - DNA, 200 bp, Lawsonia intracellularis
caggtcgagcctggacgaaccatatagtacctttagtatctatacagaattctgtatccatgatgatatctttataggctttactaatagcacggacacctttagctatttgttcagcttgagtaggagacaatgcccacattattgattctcgttcagatacaggaattttttttgttcctcctttttcatcatagata

SEQ ID NO: 1583 - DNA, 200 bp, Lawsonia intracellularis
attttgagagttttgttacccataaagcgtatgataacttcattagcatcatctttttggtaaacatacattttatctggggtaaccatcccaccaacaatagcttcaccaaggccatagcttacatcaatactaacaagatcattacgtgttgttccacggcaacctgtagcagtgtcagcgctgaaggcagtaccaga

SEQ ID NO: 1584 - DNA, 200 bp, Lawsonia intracellularis
aactacaggattgatcatacgcattatacatactgataatgatgtattttcaatagcccattcttgttttgcttgaatggcaaattgttcatctcctgtactttctgattttgttagagcatcaaggatagcttcacgtcgataaatcatggaacgtagattataggcagaagcacaatcccaatgatatgcaagaacaa

SEQ ID NO: 1585 - DNA, 200 bp, Lawsonia intracellularis
cggcatcttcccctaccatattaagatatgtatcttgtagtccagcaaatgcttttttacgagagtcttctccggctgctgacgaacgaactgctactgggacattattttcttctgcttcattacaaatttctttataagctatttttactgcttcaatgacttgtggaggaagagggactgatagaatagcacattgt

SEQ ID NO: 1586 - DNA, 200 bp, Lawsonia intracellularis
acaagaatagaacgtttacgtaactgatctatattttcttgggaagaggcaaaaccatctacaacatgttcaataaatgtccgtaagcggataaggggtaatttatttgtatttccatctaattcatattgaataatagaggctatattacggacaaattttggtaagaattcatggtcttgtacgacttcaggattatt

SEQ ID NO: 1587 - DNA, 200 bp, Lawsonia intracellularis
ccaattgatatgtgtataatgttcttcaacttttgagcgaataagtgcagcacaaactttagtttcatcaagaatttgatgaaatgcaagagaagaaatagctcgaaattgtggagtttttatttctttaatttgtccaagaagtgcagtattataatttttcccacctacaagtaattctgcatcttcacctatagtaa

SEQ ID NO: 1588 - DNA, 200 bp, Lawsonia intracellularis
taatatcagaacctgttaatactaattgtttacgtatagtttccactgagtttatactatcatggtgtgttgaaagggtctttttgctcattaggcttatccattatatcccataattaaagtaaaaattattctcaccatgtataatctttatataaaacttattctaaaaaaatagaaagattaaaagttgccaagga

SEQ ID NO: 1589 - DNA, 200 bp, Lawsonia intracellularis
gaataagttataaagtatatataaaaataagagtcactagaaattatattattaattgatttttatcttaaaataaaaaatgtttttaattacgttacataaactacattttgtttactactcaaactctataactaaagagaaaaattatagcaaagggtataagcttccagataaaaatatttttttttgcttggaag

SEQ ID NO: 1590 - DNA, 200 bp, Lawsonia intracellularis
tagataaaataagacctccattatcatgtatacctgctattattcctttatagtgttgatgttcatttaatccatctttgatgacaacactacaattttttaaacaaagatactgttctgcaagttttacccatgatgttttttggttaacatccctatgttctttatagcaaagatagacttgacttacaagggataac

SEQ ID NO: 1591 - DNA, 200 bp, Lawsonia intracellularis
cataaaggaaggatagatccatatccagaaaacagtgggtgtggtggaagatttgatggttgtagtgaggcatcttcacgaattgtatattcattagaatttttattcatattaatacctactccagctaaaagaatatcatctctttcttcaagtaaaatgccacctactttacaccattgtttattagcaaatactac

SEQ ID NO: 1592 - DNA, 200 bp, Lawsonia intracellularis
aatatcatttggccatttaagaaatacatggaatcctattttatttaatgcatgaataaaaaaggtactggcaattattgctgcttttgtctttgagaaaagttcacattggggtaatctaacagtagcatatacatttcctataggagaacaccatgttcttcctagttgacctctccctgctgtttgggaggtaacaa

SEQ ID NO: 1593 - DNA, 200 bp, Lawsonia intracellularis
taatacttccccatatagggagaagattttctttataaagagtatatgcaatatctaagcttgatgaacatgttgtatgtaaatagacaacttctggaaggtatattgtttttgaagaggacaaagaaggacatgataggcttgcttccatacagggaatagatgtattttttaatccatgaaggtttttatgaataaat

SEQ ID NO: 1594 - DNA, 200 bp, Lawsonia intracellularis
gtgggagaattatcacgtagtaatagttcaggaataagctgaggattatgaataattatattttggttatttttttctttacttgattgtatatgaacaatccttaatgtcccattgatagattttagcatagtaattttgtataatgtgttatataaagtagagatgaaaaaggaaaaaagagttcttaataaattaaa

SEQ ID NO: 1595 - DNA, 200 bp, Lawsonia intracellularis
aaagagttagcagtgtggttcttcttcttttataatttgatatgctttatttgattttactgttcctgcaatgccccaatacttagtaactccagctacagtacattcaaggagatcttctacatctgtgtcaagaacaagaacatccccaatttttaatcttaataattggtttcctgtaatctgtgtattacccattc

SEQ ID NO: 1596 - DNA, 200 bp, Lawsonia intracellularis
ttactttaagctctacaggtgtttctaaaagacgctctttaagtcgacctacccaagcatgatcaatttcaagtcgttctgtttgaaaacttgcatgaagttttgagcgaataggttcaattgttgcatatggtatacatatggtcatagatccaatagaagaatcaagttccacttcaaaattaatgacaataactaca

SEQ ID NO: 1597 - DNA, 200 bp, Lawsonia intracellularis
tcgcttggtggtacaatggcagcaaactgtggatttatttcagaacgtataagttctaattttacatcatgaacaggtctccatgattcttccatattatcaagagctatcttgattattctatcaacaataacttgctcaatacgagtaaactctcgaccttcgatttttggttgagagcctatacctccaaatacatt

SEQ ID NO: 1598 - DNA, 200 bp, Lawsonia intracellularis
ttctactagtgcaaaaacaagccgagaatctacaacaataatagcatttcctcttagaggatccattttgaagatatttatgcttgtaggaactggtagtgagcgcataaaatctccaaattttgtcatatctatagaaataggattaagttctacacgtttacgtatagcatttgataaggcatttgtacaaagacgag

SEQ ID NO: 1599 - DNA, 200 bp, Lawsonia intracellularis
caaagcgatcatttacgatttctaaaacaggcatacgcccacgaataatacgatcttgattagctaaatcaaaaggaacaattccagaatcatcttcaggaatatcagtttcactttcaatttctccaccagaaagtcctctaagaagagcatcaacttcgtcttgagcaagtattttattcatagtattatttatagtg

SEQ ID NO: 1600 - DNA, 200 bp, Lawsonia intracellularis
atctgaaatatttttatagttattgataaaagtattttttcaatctaatgtgaagttgtgcatccccagcttacttcatttcaacatagtcttcagattattattggtcaagttttactcattattttatgtcgattggttttctttttcttctataaggttgaagataaggagttttttatgttgtcaaaaataaatat

SEQ ID NO: 1601 - DNA, 200 bp, Lawsonia intracellularis
attattttttttattagttataagttttttaagtatacatacgtcatctgttgctgttgaaagtgaaaagagtacttatagtgaccaacttacttctgagaataaggtttataacaaacaatattcaggtaatagttctacaaaagtatatcataataaggaatgtagatattttgattgtactgcatgtactataggct

SEQ ID NO: 1602 - DNA, 200 bp, Lawsonia intracellularis
ttgactctaaagaggaagctgaaaaagctggttatacaccatgtaggctttgtgaaaataaaaagccttcacagctatcacaggagacagagaaaaaccatcaagaatcgttggataatacaaaaaaagaacaaaacagtcagtaataatagtcgttagctactacttaaaaaataaacggttattagataacgttataa

SEQ ID NO: 1603 - DNA, 200 bp, Lawsonia intracellularis
agagcctataataccttgtatgattataggctcttttgacagctttcaactattattatgaatattattttatagttgttttactaattttatattatttttgatgaaggatattgaagtattaggattaaaatagaggtattagacaactatagaataacaataactttttattattttttctttagttcttcagacat

SEQ ID NO: 1604 - DNA, 200 bp, Lawsonia intracellularis
taagactggccctggaataacttgtcctataaaccctttttgtagagcatggtgtcctacaaatggggtctttcgttctacttgcatatctacaactttaacaacaggttttgcaccaacagctaaagggaattgatctttaggtatttgtaacataaaagatgtgcttcccacttgttgataaaaacctgtagtagtat

SEQ ID NO: 1605 - DNA, 200 bp, Lawsonia intracellularis
ctcttaaactaataccaaaatttcggattattaacacatatccttcctgattaaaaagcattgtgcgtgatgttcttgttcgtgcagtttttataagttgctctcgaagtgatagtggttttctagttacagatgatgttgaaggttcttcttcgcttgagctttcttcagcttcttcagctagttcgacttgttcactt

SEQ ID NO: 1606 - DNA, 200 bp, Lawsonia intracellularis
gtggtaaatgctgtaggcttctcttctcgaggtaactcttgaagttgtcctcctccctcagctcctctaagcggtatttcttgaacttttagatcttcatctaattcttcgtctaaggtttcttctggtaaaggatctgtattactagttacaagtgtcatgattctagaaatatcttgactatttttttcacaatatgg

SEQ ID NO: 1607 - DNA, 200 bp, Lawsonia intracellularis
gttaagaggaaatggtgtatttacattcataatcatagctgaaaaatctgccattatagtttgtgacatacagatacctacaacagcagctatggatcgttcaggaaattcttttataagcatttctttatatttttctaatgcatcttcattgctatatttttcgtatgaaagtttgacattttgaaagtagggacgat

SEQ ID NO: 1608 - DNA, 200 bp, Lawsonia intracellularis
ctctaggagcatctcgagtaaagatgtcatatataccattttcatcaaattcatgttgatgtttgtcatcccacgtaagttctattgcacgtcctatcttttgttcaagatacaacatatgttcttgtaactctgtaggccctaagataaaaccataggcaagttgagataggggtttccctggatctttctttagttca

SEQ ID NO: 1609 - DNA, 200 bp, Lawsonia intracellularis
gtaaggatatcttttactatagtttgtatttcatatatatcaataggtccttcaggatgttcttcttgccataatgcttgaagatatggaatgacaccttgtctaatggctttaggttcatcttttagttctttttctgcaacaaattcaatcattttgtttccaagagtcaatcgagctttgtgtagtgtttcttcata

SEQ ID NO: 1610 - DNA, 200 bp, Lawsonia intracellularis
tgatttaccgccaagtggcataggatacggtaggttagctcttccgaaactagagcgtgcttcatattcaacaagttttgccatggaaagttgtacagcttctgattgttttgctgtaagttctggtgcaactctagcaggttgtggtttgagtcttgatcctagagttttttcttttgtctggagctctccctcatcgc

SEQ ID NO: 1611 - DNA, 200 bp, Lawsonia intracellularis
caaggataatagtttttctatcaagcattgcagtaaaaagctctgtactatttcgaataagcataatggtatccacatgttatttagattttatattataaaaataaatataaaacatatttatataaatataaaacatatttaaactatatattataagatcatttaaaaaatattaagtatgctagatagaaataaat

SEQ ID NO: 1612 - DNA, 200 bp, Lawsonia intracellularis
taaattaaaaaaatagagtgtaagagatattattccatttactaattatgatattctgacttcaattccttttttcctttgtagatttatatcagtaacttgaagcttaggttttgcacctaaaggaagaggaaactgatcttttggtagttgtactgatagctgaagatttcctaatttttgactttcacctgttactg

SEQ ID NO: 1613 - DNA, 200 bp, Lawsonia intracellularis
tacttgttacctgaatatcataagagtatttaaatagaacattacttggtgtttgcataactattcttcttggattgtcaggagaaggtggttcattacttacattcattaaaaaattttctggcatttctaggctattagaaggaataaaagggcagagaggatatggtgtacccattcctctaataacctctgttata

SEQ ID NO: 1614 - DNA, 200 bp, Lawsonia intracellularis
actggtgatatggtttgtgacatcataacacacacaactcttctcatagagatatcagggaattcttctttaattttatcctgatagagtgatacaagtgtttcattatcatactcattatgtccaaaacgccaaccacccaagaaaggtgtttctcttacacaatctttattaaaaacagtataaataccttcattatc

SEQ ID NO: 1615 - DNA, 200 bp, Lawsonia intracellularis
aaaatcatttttatgttcttcgcagcatgtttctttgatggctgtctgtatattttctcctatgtatttcatgtgtggacctaactcatcagatgtaagatgataattacatgcaaggtggccaagagcatgaccagggctttctttgagagttttaatctgttcttcaacaaatgtttttattgtagggtagcaactgt

SEQ ID NO: 1616 - DNA, 200 bp, Lawsonia intracellularis
caccttcaggatgtttatttttccataatgattgtaggtatatttttactccatcctgaactgggcgaggttgatcgtgaagttcgttggttacacagtgtctaatcattgcctttccaacaatctttcgagcgcttgttttcaagtcttcaaatgaacgtccacagaaaggtaatggttctctaaggttgcaaggacca

SEQ ID NO: 1617 - DNA, 200 bp, Lawsonia intracellularis
tgtttacttattgcatctttttcaacaagagttgccatagcaagtagtaaatcatcttgacttgtttggacaaacctactggctacaattgcagctctagctagatcataactataacctgcccatgtttgtgtatgaagctctccttctttatcaagtacaagagaatagccctcatccatgtacccaaataactcttt

SEQ ID NO: 1618 - DNA, 200 bp, Lawsonia intracellularis
actgttattaataagcattagaataatacctcgctacatttttacatgaattataggaaagtaattatttttaagctgaaatagttagtcatcatagaaaaaaagtttatactgctaacatcttttgtacgtcgaattctttagatgaggtgcaatcattgtcttcatgattgaatttattaatcttttcaatccactct

SEQ ID NO: 1619 - DNA, 200 bp, Lawsonia intracellularis
cctgtcagtagaataacatttccaataaggtctgttagagaggaataagtaagattctcaaatggccatgcaacttgtaatgttattagtccattattgtaatctaatcctaatgttgcacctgatgtctctataaaaagattattagctgtgagaagctttttaaaaagcttaagttgatttttttcagggattatacc

SEQ ID NO: 1620 - DNA, 200 bp, Lawsonia intracellularis
tataggtgcttgaaaaagaataatttttctggactccagaagaccaatgttgatattaaagccgcctatagtaagggcacctgagtattctcctggtgctataactgtattaagtccttgatcatgggcaatagtattaagcataagaataatattttgtaacataacaatctcccatcctactaaatgtataggtatag

SEQ ID NO: 1621 - DNA, 200 bp, Lawsonia intracellularis
taagataataaattttagatatatcctattatgaatgtatataaataacaggaggataaattgaatgtgtcttaataaatttaactagttataaatatagctgaattactagtttgtaattatgtatagtgaatgtaaataactataagtagcaatagcagaactattatatatatatataatacttattatatattatt

SEQ ID NO: 1622 - DNA, 200 bp, Lawsonia intracellularis
gtagtattttttttttgaaaaaatttttatacatatagttaaatcaagctacaaaaccaactggcctgtttacttgcatatttttgacttgaatatttgggatattacttattggtaaaggaaattgccctttagggataacaatgtccacttgaacatttcccacagtttgttgaagatctaatatagggcaacaaagc

SEQ ID NO: 1623 - DNA, 200 bp, Lawsonia intracellularis
ttgataccatagttacaatgtataataatttcttcattattatgggtaagtgtcattcgtggttgaatactatcactattttcaataagtggcacaacgtctggtaccatatcattatcatctttattattaggtatgtagggattaagaggacagtatgtctttataccagaaaccatacatgaaaggttaggtaaaga

SEQ ID NO: 1624 - DNA, 200 bp, Lawsonia intracellularis
tttttgtgtcataattgtagtaactattgcagccatagaaaactcaggaaattcttctttgatcatcttaacgtatatatctttagcatttggtaagtctgattgaaggaatactctttcaccttgaattgaagggcggtctctgggtgcatctacagtaaaaaggttgaatattccatcgtcactatagttagtgagtt

SEQ ID NO: 1625 - DNA, 200 bp, Lawsonia intracellularis
tatcttctttccatgtttcatctatagcttctagtattccttgtttaaagaactgcatatgctctgtaagagcttcagagtctatagtatacccgtatgcaaggttagctattgtttgtcctagaggatctgttcgttgccagtgatcgatttcttgtgtaacatattgttctatagattcttgttttggttgactacca

SEQ ID NO: 1626 - DNA, 200 bp, Lawsonia intracellularis
gaattttccttttcccatgaagaggtaagaaaagatataacacctttacggataggctcaggtttattgtagaggatttttgttacataaattccaactagtctactacttataaatgaattaactgctgggtatgaaataggaactgtactattatcttctgcccattctttttgaatatattcactaatagatttttg

SEQ ID NO: 1627 - DNA, 200 bp, Lawsonia intracellularis
tacttgaggattttctgttccaaattttttttctaaaatatatgtaatcatagcagaacaaagtatttcttgagatgtagcagctatttcttccaaagttcggcttgtggaatgaagtggttcttgaatgtttcgaggacctgcatttactatggagtcagaattaacaatattggccattgcaatttgaagacattgtt

SEQ ID NO: 1628 - DNA, 200 bp, Lawsonia intracellularis
gacgtaccttaattgtttttgctgatctaaagagatcagcaaattttctaaaagaagaagaaagccgattttctgtttttatattcccactgttatcaatagtgagagtatatccttgttccaatgcttgaagtaaactgtctttattagtaataatcatttgttatacctatatcttagtgacatcgaaaaaagtgtag

SEQ ID NO: 1629 - DNA, 200 bp, Lawsonia intracellularis
aaaaatagagtgtaatagtaagtagcctgtaacttgttataataagttacttaaatacaaagttcactccattaatgaacagtagtatatcagttagtatagagtttatttttaataattataagaagttatagtaattatggtataaattaaactatatttatatataacaaatctatttttgctttactaaatgcaaa

SEQ ID NO: 1630 - DNA, 200 bp, Lawsonia intracellularis
gtttattccagtactaaaggaatagtactgagttatatattattgtatataattaggtttgtttaacaattataagaagttagagtaattactttataatttacaatagttatatataagttataaaatatatattgttgttttactgtcaatatagttgtttaaatggggtaactatgcaacttttattggcagtaatt

SEQ ID NO: 1631 - DNA, 200 bp, Lawsonia intracellularis
tagggttaaagaaaaagtaattagagataaaacttattcaaataatccaggtatttctattaatactgtatagctacgatcatagccgtcatatcggtatctaccaataatacgataacattgtgctaaatatgtaacttcaactagttgagagtttgttttaccaaaagttccaagttctcgtaggtttcggaaatctt

SEQ ID NO: 1632 - DNA, 200 bp, Lawsonia intracellularis
ctaacgtaacagatacatttggtaatagctgtatagaaaaagagttttgaagtaagcgtaacctactagacataataatattattttcatctcgatattgaagatgctcacggtaattatagtattgatcacgaaagctaaggcctgttttccaagaaaatctgtctgatttgaatatgatattatgatcatgtctagta

SEQ ID NO: 1633 - DNA, 200 bp, Lawsonia intracellularis
atattaccgttatatggagaaataaatgtcttacctgaataagttaaccaagatagtatataaagttctagttcagaatagatgtcttttatagggcgctttggatatttttctacatattgttttcggcgttcttcttcaaaatcatatcctgttgataagttccagtagagaagatcatagtaggaagtaataagtgt

SEQ ID NO: 1634 - DNA, 200 bp, Lawsonia intracellularis
tggtgtaacactattatcattattattattattattatctacactaatagtaacattcttttttgtgagaatatttactattgaataagtaaggtcattttggggaaggatcctatctgatagtgtataaaatggatttttttcttggccttctctaggtataaagctatagcatatacgtggttggattgtatgcttga

SEQ ID NO: 1635 - DNA, 200 bp, Lawsonia intracellularis
gtgctgtacaaaaggtttttcctatactttgagaatgaagattaatagtttttttatcctttagtcgccatattcggtgagcttgtgtactactttctagttgtaagttaaaaagtgaacgatgctgacctgtttgacgtggtgttttagtatcagggacatgtggtgctacaggacttgtgtgtgattttatacctgtt

SEQ ID NO: 1636 - DNA, 200 bp, Lawsonia intracellularis
tgatagtaagtttcacgtagcccaacagttgttataacagatccatatttgagatcgattggtaatgtaacttttggataaagttctgttctccaacctttagtgcctttagcacgatacatataagcagactgtaaatgaatggcaccctctaatgaaagaggttgaaatagttttccttggtaaagaaacatgtcaat

SEQ ID NO: 1637 - DNA, 200 bp, Lawsonia intracellularis
ttgtggaattcgttgcgttaactcactttgactagtaggatgattcccatgtcctaatgttggatcttgttcatatctaatatttcctactacccctatacgctgccaatcttttctaataagtaaagcatttaatcgagattggtcatcttcttggatatctctgccaaacatttgaaacatttcactacgggagtgtg

SEQ ID NO: 1638 - DNA, 200 bp, Lawsonia intracellularis
aaaagcctgttataccttgatcaaattctctaagataatcttggtctgatacatagtctaaattagatatatagcaccaagttgagtttccaataaaaccatcagccattccacgaacccaataacgttgatggttattacgtacaagttggcttgatggatagacaggatctttccctggtgtgacaatattattttta

SEQ ID NO: 1639 - DNA, 200 bp, Lawsonia intracellularis
tcatgaatgccactagcagcaaaccatgttttttgatttgtaaatttgtgtgaacgatatcttacagttcctaatggacctatttttgtcatcagtccagcataaaatgttagatcgctgctttgatcaatatttaaaaagtatggttgagtataataaattccacgtcgctgactgattccataattaggatttaaaaa

SEQ ID NO: 1640 - DNA, 200 bp, Lawsonia intracellularis
acctgattgtcttgtttgttttgcaggtattgtaaaaatagggctatacattacatctatgtttttaattttaaaggtagaatcatataattgtgcatatccatcaacttctactattgcctctttagctgatattgaccatgctggatgaggtccgtcacatgtagtaactttgacattattaaaagtataataatctc

SEQ ID NO: 1641 - DNA, 200 bp, Lawsonia intracellularis
cgtaatgtttggtaatacgtgcaccagaaaagtaaacatgtgatgaagagataaatatgttcccattattaagccagcctgttttagtattcaaattaaattctgcttcgtcagcattgatttcattttcatccatctttacagtgacatgacctttaaggaaaagccaacctgttttttgataataccttgcaaagtca

SEQ ID NO: 1642 - DNA, 200 bp, Lawsonia intracellularis
gctttaaatacatcctgtccttttgtaaggataatgtttcctttagcttcaataatagtattatttgatagtgtagttaacgtatcagcttcaaggttccatttagtttgagattggttaatatctggttgtgcaaattcggatatgtttataatagataaagcttgtagaggaaaaaatgctataaataaggatggaat

SEQ ID NO: 1643 - DNA, 200 bp, Lawsonia intracellularis
aattatataatatataaggttagttagaataaatggtaaaaaaagattatacaagatatattcctgtttgtatccaataaataaatacgataaaagtatattgcttatttgttaaaatttgagcgtataatctaatatatttttaatataaaaaaaagtaccaattaattgattgttttgggctatctatgtattcaagt

SEQ ID NO: 1644 - DNA, 200 bp, Lawsonia intracellularis
agtgtttgtataaagatccatttagagcgattacgttataatttacgtatacttcgttctagatatcctaatgttatgcctgttattaaagctaatgcctatggtcatggtatcagagttgttgcaaatgtccttagagatgaaggcgttcaacatatggctgtaggatctattacagaagggtttttattacgacaaga

SEQ ID NO: 1645 - DNA, 200 bp, Lawsonia intracellularis
aggtcatcaagcttttttacttgctttgttaggacctttttctgaagaagatgcaagaattgctgtagtacataatataactccggttattcataatattgaaagtctccaatctattgttcattatagtagagtacaccaaggtggtactgcagtaccagttgctattaaaattgatactggtatgggcagacttggct

SEQ ID NO: 1646 - DNA, 200 bp, Lawsonia intracellularis
tttcttctaatgactatataagtcttatagatttattaaggcatacaccagaagtaaatcctattttattattatcacatctagttgcaccagaaatttcatctcttgataatgttacacataaccaagtagagcaatttgcaagagcttataaagctattaaagaagcttttccaactataaaaacttctttaacaaat

SEQ ID NO: 1647 - DNA, 200 bp, Lawsonia intracellularis
tctcctgggcttttagcatggccaaactatataggagatttttctagacctgggatagcgttgtatgggggaaatccattttatggtacaagtcgtgtaagtcttgggaaaggttttttaccagttatggaggtggaagcaccagttgtagctataaatacagtttctgctggttcttccattggatatggttgtactta

SEQ ID NO: 1648 - DNA, 200 bp, Lawsonia intracellularis
ttatgctaaagaagatatacgtgttgctgttattggagcaggctatgcagatggatattcacgaagtttttcaaataaaggttgggtagttataaaaggaaagcgctatagaattgttggtagggtttgtatgcaaatgttgatggtggatatcactaatagtcatagtaagatatctattggtgataaagcatttttat

SEQ ID NO: 1649 - DNA, 200 bp, Lawsonia intracellularis
taggtggtgggggaagtttagctattaagccagaagaacttgcagaatggtggggcactattcctcatgaagtttgttgttcattgggttcatcaataggagctcaacaaaaacaattagtcattatttgaaataagtattatagtgatacattttgacatgttggacaaataccatataaataaagctgatgggacttt

SEQ ID NO: 1650 - DNA, 200 bp, Lawsonia intracellularis
aaaataaaaccatattgtttggcatatttttgttgaagtttttcaatagtaggatctataaactcaaagttaataccacatgtatcacaaataagatgatcatgatgttcattaaaatgttcatatcttgcaataccatcactaaaacgtacttctcgtgctaagttggcttcacaaagaagtttcatagtacggtaaac

SEQ ID NO: 1651 - DNA, 200 bp, Lawsonia intracellularis
agttgcttgcccaagagagggatcttctttttttataatatgataaatttcttcagtagttaggtgtcctgttgtgctaagaaatgttctaataatttgttgtcgttgatgggtgtttcttaaacctttattcagaaggtgttcagaaaaactacggagaatgctttcaattcctggaagctttttagacataattacct

SEQ ID NO: 1652 - DNA, 200 bp, Lawsonia intracellularis
ctagagagtaataactgtatggtgttacaatctttttgtcaaagtgtaaaagtgagagaaattttttaacttttaaaagtagatagaagtttttatgtataagttatcaaaaaaagtttttattgttattcctcctcacgaagtaggactttttcgttttttgttagaggggtatgatcatttagcacaatttacagttt

SEQ ID NO: 1653 - DNA, 200 bp, Lawsonia intracellularis
tagatcgttttcaagccttattaaagatatttttttcatcttatcaagaagaaagggtaactttagctttgaatgagatatctgaagttatttcatttaagaaaattaactaggttgacgtgcaagaatttttttaattgcattcattacttgtataggagttagttcttccatacatttacgttggataggacattttt

SEQ ID NO: 1654 - DNA, 200 bp, Lawsonia intracellularis
tgtctccatgtagtgagcaagggcgacagggtatattggcttcaaggatgatattggcatcttctggtgggaaaaatccccagtcttttgttgttggaccgaatagagcaataactggtgtttttatagcagtagcaagatgcattggtccagagtcaccagtaacaagaacggctgctcttttaagtaaagcacatgtc

SEQ ID NO: 1655 - DNA, 200 bp, Lawsonia intracellularis
tctcttattgatgttttatttgtaaagtcatgttggggtgggatattttttaaaggagtaccttgccctataataaaccatggaattttttcagatgtaaggtgttctatgatgttataccatgagttagtgttccatgctttatttatatgagttgcataaggatggattgctacaactttttgttcaggtgattccaa

SEQ ID NO: 1656 - DNA, 200 bp, Lawsonia intracellularis
aaatgtaaaatagtttttaactttatcttcttcttttttatgaagtaaaataattggtgtaagctgatcaggtgttggtggaagagtgttaagtgcataaatatatcgttgtggcacagtccatttattaagccgtttttttaaaagacgatttttagttaaaagaaataatctacgctcaaaactcatttttgaataac

SEQ ID NO: 1657 - DNA, 200 bp, Lawsonia intracellularis
ggtatataggccctctccataataaacttattaggcgtgtttttagtgtgccatgtaaatcaataagtccatagtttttatggtggttagcaagagaacgagcagtagatataatatgtttaggtaatagttgttctttggttaaagcaataatattttgaacagcagggttattttcaaatatagatgttaagccttct

SEQ ID NO: 1658 - DNA, 200 bp, Lawsonia intracellularis
tgtgtaataatagtaaacttccaattaaaatgagtataccaatagtgtataacaccagttgtaagaacaacatcgcctaatgcacttaatcgaataacaacccagtttttagttattgattttatggtagttgaatataattcatttttgtccataaaataattctaacaatagcctgtaaaaaaagaaagatctaaaaa

SEQ ID NO: 1659 - DNA, 200 bp, Lawsonia intracellularis
tatactaaaaactgttaaagaagctgttagggtataatttttatctaatactgttttgttctttttgagtacatattttggggtttggatacgcatagtagtatgctacacctaattatttgaaaaaattatatattatcaaaatagttgttatcaactattttaccagtttaattgtatagttaccaatatattggtta

SEQ ID NO: 1660 - DNA, 200 bp, Lawsonia intracellularis
tagctttagctttagtaacaacgtgttaaaaaatataattagaaaataataagaattgtatctagttgtaggataatgataaataagcttttttataattttctaatagaaataacagtctcgattttttctgcaaattctgaaaaatttaatcctaagccattagcaagaccaataagaactcctagagtaggatctga

SEQ ID NO: 1661 - DNA, 200 bp, Lawsonia intracellularis
caatcctttttctagataataaatataatttctttcaacatcagcaaattcagcaagtgtttgttgtgaaagtccacgttgttgacgtagcgtccgtaacattacaccaaattgagtagaatgaaactttttcatgttaattatctttaggctaacatttcgattatttgtactaactatatttagcattctaatacctt

SEQ ID NO: 1662 - DNA, 200 bp, Lawsonia intracellularis
tctttctttttttatgtattgcaagagcagaaagttttataaaagtaatagatggagatagcttaagtttatataaaacaggtaataaaaaaatattgcgtttatatggcattgattctcctgagctatctcaaccctttggtttattagctaaaagagctacagaatttttggttgagcatggtaatattgtagtcaaa

SEQ ID NO: 1663 - DNA, 200 bp, Lawsonia intracellularis
aatatgggttatgatatttatggtcgtacgttagctattatatatttagaggatggtttaacactacaagaacatttacttcggaaaggtcttgcttgggtatatcctaaatattgtagcgatgttatgtgtaactactggtatgaactagaagaattttctagaaagaacaagtttggactttggagtaaaaaaagagc

SEQ ID NO: 1664 - DNA, 200 bp, Lawsonia intracellularis
tatcccaccttggaagtggagaaagttaaagctgcgatattagtattgtattttgtaatagtaatataatatagtataggtataattatatttaataataaaatttattaaatataattgatatatttttattgatgtgttgatatataacatttcataattattattcagtgataattatattttcattaagttataat

SEQ ID NO: 1665 - DNA, 200 bp, Lawsonia intracellularis
tttttaataactatatgatcataatacaatatacattatagatattatattattttaatatacatcttgtttgtataatagttacttttttattttatgtagataaaagtgaggttgcagacacttaacaaggggataacatatggttgcgacagacgttatcaaggatctaggtcaggaattaaatattccaggacttg

SEQ ID NO: 1666 - DNA, 200 bp, Lawsonia intracellularis
aatttgatcaaaatttggtatgttcgttctctgtccataatggtaatcttgatatgactattgagactaatgagacaggagatttagtctatgtgtgtggatacttaggaattatgcctgatgataataatgctgccgctgctgttgctattctatttgcacaagcaaattctacacttagttctatgaatagaggagta

SEQ ID NO: 1667 - DNA, 200 bp, Lawsonia intracellularis
cttgccctagattataatggagaaagattattattttcaaagctttataacgttagtcattgggaacctaatgaatgcattgagtcaatcttacaactcatagaggatgcagaggaatggaaacatcgtttatatcagcctgattttggacttagtgaacttacgaaaggtggtataaataaaacagaaaataataacag

SEQ ID NO: 1668 - DNA, 200 bp, Lawsonia intracellularis
ctttttaaaagtctaacttgtacagtttttagaataaatattttttagttttacttagaagctatttttaatatagagcataatggaattataggggagaataccatgagagttggaagtagaccagaccctaatgttcctactaatgttgagcaaaactcagatattgatagtgatgataacacatcttcaagtactac

SEQ ID NO: 1669 - DNA, 200 bp, Lawsonia intracellularis
ttgttgtgtttctactcattctgtcaatgaaggtgctcaacagcacagtgatagtacgccactaacagacagagcttctcagggaagaaagtgggatccatctattgattttaataggctaggtgctcaattaataaccagtgtacagtctttttttactatcattagagatagagttagtagttttattacaaatatga

SEQ ID NO: 1670 - DNA, 200 bp, Lawsonia intracellularis
aagacagtggaccatgggctcgaagtagaggttcatatgattttcacagggatgatgatacaataagtacgacaagttcagattcatatactacagttagtgatataaattcctcagaagacactgctagtcttaatagttttcactcagtcagtagtcatagctctagtgaaaaaacatttccagtttatactcaagaa

SEQ ID NO: 1671 - DNA, 200 bp, Lawsonia intracellularis
cagttacagcagtttgcacaagaaggtgttactaatttagttcattcaagaccttatgtttctaatggaccttctattaaatttcctgatcaacttggtggtcatggagacgttggttttttgcaaggtacaaatatagttttcaaacaaaatcttacagctcaagaggctaagacatataagttattaaatgacttgaa

SEQ ID NO: 1672 - DNA, 200 bp, Lawsonia intracellularis
aaattggcttcaagatcctcaaccttcatctatcaatattcctgaatcattaaaaggtatctcgcgctcagagatgaaacagttacttgataacaaagacttgttattgagtagtttgccatttcctctagcaatggcagagggtgaaggctcagcagctgtagctataaaaaatgttaatatgtatcaatcggaagaag

SEQ ID NO: 1673 - DNA, 200 bp, Lawsonia intracellularis
gctcatttaataaagtatcttctaaaggtgttattgatgtaaaacttggctgtaaaactatgtctcttgctgaattaaaagctcattatcctaataaaactaagggaatttcactttttagaaagattgttacaaatggtgtattacctatgttgcgtggaacaactagccgtggttatgaggtaataccacaagcaaaa

SEQ ID NO: 1674 - DNA, 200 bp, Lawsonia intracellularis
ggtatgaaacgactatttatggcaaaacaggcatctgacaaccttatgcaaaacttatctgcacgtcttacagcacaacaggctgtaaatttagctaagcaagtgactgacttaacaagagctatgcgtatattacctataacatttgttggttcaagtatgcttatagcacttccagatgcaagtagtactaactctat

SEQ ID NO: 1675 - DNA, 200 bp, Lawsonia intracellularis
gccacaagttggattagttgattttggccatccagtatttagtactgaagtaactgtagaaggaccaatcacagagcaagtttacggtgaattaaaagacaactatatggaagctattggtaaactacaatctcaaattgaagaaatttcatatcaggcatcaagacattaatatatgctttagattggtagttatttta

SEQ ID NO: 1676 - DNA, 200 bp, Lawsonia intracellularis
agatagagccattatgaggatattgtttcagaacaaatttttgttgaattaaagaaaacatatctgagcattaacctatcttcttaagataaggagtagttatttcaagtatcaagaggttatactagtattagttttattattagttatgttaataaatatgtagagttagtttagtcatataggtatttgtagactaa

SEQ ID NO: 1677 - DNA, 200 bp, Lawsonia intracellularis
tgctctttggtggaagaataacctatttaaataaataattaattaatgttacattatttatttagaataaattaagaattctatggagagcaatatgaaagttggtccatctgatcccggtattaatagagttcagatagaggaacaaccatctacagaaagtataagctcttctagttctggaagcagtagtggcataa

SEQ ID NO: 1678 - DNA, 200 bp, Lawsonia intracellularis
gaactagagagcaaagttctaatcttgatcagagacgaatgactagtagtaacctgagaatgagccttagattaaatcctgttgtatcggataaggtcctcaaattttttggattgcgttcagcaagtggaagttactctccatcaacatcttctagttcttcttccagttctgcaacaagaagtagcagatatagttca

SEQ ID NO: 1679 - DNA, 200 bp, Lawsonia intracellularis
acagattcattaagctcaagaagtactattggaagtaatataacatttagtgaaagcgatgaatcttattatagtacaatagaagaagacagtgaatcaatttatgagtcagtaagtagtagcagcagtagcgatatatatacatatgactctaattctaatagcagttcagtttcaaattcaacacaaagtcaagcacc

SEQ ID NO: 1680 - DNA, 200 bp, Lawsonia intracellularis
agagctacctccacgtccaaatgtattgcaaagtgaagcaccagaaccacctctacgtccaactagtacatcttcacagcattcaatacaatctcaggattcagttggatctgatgatgttttttggtctgaatctgaacctgaatcactttatgcagataaagagcaagttggggaaggtgcttatggaccaataagat

SEQ ID NO: 1681 - DNA, 200 bp, Lawsonia intracellularis
cttcattagaagaaccaatagttttagagtcaaattacatatcatttggttctgatggtgtagtctattctgactttgctccaatgccacaggttaccagtaaatcttcacaatcagactctgtatcaacaccaccacctgtttcaccaagagagcaggttgcaggctcactaggtgtaggaagtagatcaaaattatct

SEQ ID NO: 1682 - DNA, 200 bp, Lawsonia intracellularis
tctactaataatgtagctagttcgctgtttgatcctaatatgcagcgtattgcacgacaggcaattgataagactattcatggaaactttggtagtccaaatggaccaaaagttgattttccatatcaagttggaggctatagtaagacaggttatatagctggcacagatcttataatacaacaacatgtaaacccaac

SEQ ID NO: 1683 - DNA, 200 bp, Lawsonia intracellularis
tgaacaagaagtgtatacatttatgtctcaagttggtgagtggttaaaagatcctcaaggagggcctgaaaatgcaccagaggtccttagtggtcttacctatccacaactaagtgtaattcattcttatagagataggcttctaggaagtttacctattcctgtggctatgggtggaactagcgacaattcagctgtag

SEQ ID NO: 1684 - DNA, 200 bp, Lawsonia intracellularis
tacttttaaatccaaataaacaacctgatggatcaggtggtgttatgaatttatctggatttgaaagtactgatgttaaagtaggtccaatacttgtttccaaaagcgaattatcagctcactattctaaacaagcaggagggttagggtgggctaggaaggttgtgactggaaggattgggccagggatgcgaggggca

SEQ ID NO: 1685 - DNA, 200 bp, Lawsonia intracellularis
actatccgtggatatgatatgaaacttgggaaaaatgaacgtggtttttcaagattacaaacagcagtaggaaacagtgatgatgctttcccaaaaaggttaggaggtcttacttctaaccagctaaaaaacttggaaaagactatggaggggttacaacaagcagctcattttttacctgttacatttgtaggatcaac

SEQ ID NO: 1686 - DNA, 200 bp, Lawsonia intracellularis
tcttcagtttgtattaccaaatcctggtgatacaaccactatgcctcgtgtaatgctaggtgatataggtcatcctatatttaaagatgaagcaacaggagatggtcccataagtcctcgtatctatgataaatataaaagcaattttacaagtggaatggattcaattaaagaaactatttcaaatatagtaaaaagta

SEQ ID NO: 1687 - DNA, 200 bp, Lawsonia intracellularis
aaatagaataatgtaatatataatataactatatgttaatagttatagagagtaaagtacatattgttgttaaatattatataatataattatataaatattgaaatattaaataataatattatatgtaatattatactgtttaatttatatgctacatgctaaagtagcaaataaacgttatgacatattattacact

SEQ ID NO: 1688 - DNA, 200 bp, Lawsonia intracellularis
taaatttgtagtttatgttacatacatgttctttacacattaaaccctgagggtataaaaatggtttcaacagatgttatcgatgcattgggtcatctattgaatattcctggtctatccttcaacgaagatttattatgtttgctttctgtaaataacgataacgttgatgtaactattgaaaccaatgaatcaggaga

SEQ ID NO: 1689 - DNA, 200 bp, Lawsonia intracellularis
cttattatatgtatgtgctcacttaggcactatgccagatgatgataatgcagcagcagctatagctcttctctttgcacaagcaaatgcagtgttaacagcaatgaataaaggtgtccttgtgcttgactataatggtcaaggtttaatgcttgtaaagttatatgaaatgaagcactgggaacttgaagattgtttag

SEQ ID NO: 1690 - DNA, 200 bp, Lawsonia intracellularis
agtctattcttcaactttttaacgatgcaggtgaatggaaaaatcgtctatacttacctgattttggtctaggtggaatggattttgacttagatactagttcaagtggttcagatcaatttatgagggtatagtttttgtttaactacttattaccttaatagataaatagatatgccacagtttgattgctaaggaga

SEQ ID NO: 1691 - DNA, 200 bp, Lawsonia intracellularis
acagtatgactaaagttggtggtagtaatcctttttcaacacttgcatcaatggttggctttagcaaatcttcttccagctcatcttcaagtaaggtagctgaattaaaaagtaaatttgaagcacttgggacactaacaaaagcaagtcctcgtcctgcaaatggcactcaggatactaatcgattaagtgatagacta

SEQ ID NO: 1692 - DNA, 200 bp, Lawsonia intracellularis
tttagaggacactatacagttcctgctaatacagcttcaagagtaggtggtcatcttcagcgggttgatgacaataaaagtagcagttcagcagctaatgttgcaaaaagagctgcagcacattcttcttttgcaagttcaaacccaggactccaaggagctagcggttcttcttctggaggaacaggcggaagtataac

SEQ ID NO: 1693 - DNA, 200 bp, Lawsonia intracellularis
agatcaagttaaaagtaggggaattactgcaaggaatttttcggattctaataataattctataggatcagggtcaagcagtggaagtatattagatcaggttagaagtcaaggtattactgccagaggatcatctatttcttctggtaatgcatcaggtactagcaatgttaatgatggaacaagttcaagagattatg

SEQ ID NO: 1694 - DNA, 200 bp, Lawsonia intracellularis
gagctaatgtccgtaatactcgtgaaagatttgaagctggtcctggaggtgctcaaggagagtctcctggagtaaaagatgctaaagaagctactaaaggagttagtgtttctaatttaagaggaatatttgaaggaagaggtggtgcagataataatcaagtaggtagaagctctggtggagtttcaggagcatcagga

SEQ ID NO: 1695 - DNA, 200 bp, Lawsonia intracellularis
tcaggaggagctcaagggacaggaggaacatcgggattaggtggagcacaaggtacattaggaagtggaggtcttgatggaggaggagtttcaggtgctgctggtggaacttcaggcgcctcaggagccggaggagcaagaggtactgctgatggaataacgtctcctggagcaagagaagcacaagaaactattaaaaa

SEQ ID NO: 1696 - DNA, 200 bp, Lawsonia intracellularis
tgctggtgttagtgtaagagatttagctggaagatttagtggagctcaaggtacaagtggagcttcaggagcagcgggagcttcaggagcctcaggagccggaggagcagctggtgcggcaggaggtggaggtcttgatagaggaggagtttcaggttctgctggtggaacttcaggcacctcaggagccggaggagcaa

SEQ ID NO: 1697 - DNA, 200 bp, Lawsonia intracellularis
gaggtactgctgatggaataacatctcctggagcaagagaagcacaagaaactattaaaaatgctggtgttagtgtaagagatttagctggaagatttagtggagctcaaggtacaagtggagcttcaggagcttcaggagcagctggtgtggcaggaatgccagcaggtagtggagatgttgttgatggactaagaaga

SEQ ID NO: 1698 - DNA, 200 bp, Lawsonia intracellularis
ggaggagaagatactgtcgatggatttggaagaaatcagggtagtggtcctatccctagttctgcagattttgtagatggtcctataggcggtatacaaggagctggaggagcttcaggagcagcgggagcagctggtgcttcaggagcagcgggagcttcaggagcagcagagccacttcctactaatggtacagatca

SEQ ID NO: 1699 - DNA, 200 bp, Lawsonia intracellularis
gcagatagctgaagtcgttgtaagaaatgcagaaaatggtcattttgatggtattgatttctcgacacagcctggtggtgtagaatcaaatacaggtagtatccctggaacagatcttattgtccaacgagacatcactcctggagaacaaggagtgtataataatctcagtgagatgggatcatggatggatagcccta

SEQ ID NO: 1700 - DNA, 200 bp, Lawsonia intracellularis
atgctagtcctacaaatgcaccagagtctcttacagatgatcatagtgttttgactacactacttaataataaagaaggcctacaagatactgttccttttcctcttgctgtgggtgaaggcactgttgttactaaaactcttgatccagacattgatacaagtaagattaaaatcccacttgaaattgtttttggttct

SEQ ID NO: 1701 - DNA, 200 bp, Lawsonia intracellularis
ggaagtatgtatggttctggtattggaggaggtagtagtacaattagctcctcaatgtctgatgatggaagttctagcataggatcaactacacgtaaaaatagagcaggtgaaataataagtagaattgcaatgaatcaatcacctggcgctggtagcgggggtcaaactgtagttggtggtcttggttctggtagtag

SEQ ID NO: 1702 - DNA, 200 bp, Lawsonia intracellularis
taatatcaatataagtggtggacgtggtggtattgtttatggaccaatgcctaatgtgaatgtagtagctggagatggccttaatagactacagcttggtagtggaataaatccattagcacttcttcaggaaagaatggttaatttttctgctgctcaactagagcatttacatggccaacttacaggtatgatggcta

SEQ ID NO: 1703 - DNA, 200 bp, Lawsonia intracellularis
tgatggaagctatgcctggcgtagcatttgaaggtgcaagtgtccaaatgacattacctgaaccaggtgatacacagactatgcctagtataaggctatcaggttttggagagccaaggttgcgggaaaatataggacagccagggcaacctccaacacaagaagcatttgatgcattaaggaatggtccactaaatgga

SEQ ID NO: 1704 - DNA, 200 bp, Lawsonia intracellularis
gtaagcgagttaatgagccaagttcaagaaatgataactgtaaggagtgaaggaagtatttcactaagcagaagtagtagtttatcagatttaagttcagaaatataactagctactttgttaacatgctatgacacaaaaatctacaaagtaattttgtgtcatatcagtatatttatataagtaattatgatgtgata

SEQ ID NO: 1705 - DNA, 200 bp, Lawsonia intracellularis
ttgttagatagtataactctacttattagaattactagttgttagttggatatagtgtgctagttgcgtttattaataatatattatggttatctatttacaaacaatatagtcttatagagaaaaatacagctagtgtagcgtaattatagactattatatttctagatattatttcaactagttcaagaaatgataac

SEQ ID NO: 1706 - DNA, 200 bp, Lawsonia intracellularis
tgtaaggagtaagggaagtattcgtaagcagaagtagtagtttattagatttaaattcagaagcataacagactactttgttaacatgctatgacacaaaaatctacaaagtaattttgtgtcatatcagtatatttatataagtaattatgatgtgatattatcagataatataatttaatataattctacttgttaga

SEQ ID NO: 1707 - DNA, 200 bp, Lawsonia intracellularis
attattagttgttagttggatatagtgtctagttgcgtttgctagcaatgtactatggttatctatttatataataattatataggaaaatatagctagcatactataattatagactattatatttctagatattatttcaactagttctatatagaaaaataatgaaggaatactgcaagatacctttattgttatgt

SEQ ID NO: 1708 - DNA, 200 bp, Lawsonia intracellularis
agtgtgttaatagtaaatggggtttaattctttttttattattaataattatagttagttatgttgttttattgagaggttgaaagtatgatttcatcaggagtagatagcatattttctttaagtttaccctgggtaaagagctcttgtgctgtttgatatacagcaattgcttgttggattaatattgaattagattt

SEQ ID NO: 1709 - DNA, 200 bp, Lawsonia intracellularis
atttgtagcagttgtataagatgataaaaaagattctattattggattttttaatggttctaatattactagttctttttcagttagataccctaataattgatatgttccaatccaagctctaccatcatttttagaaagagttaagatattctttccaaaaaaactagaactataattccagttcaatagtgaaaaaa

SEQ ID NO: 1710 - DNA, 200 bp, Lawsonia intracellularis
gagtaggtgcaatatctaattgacaacataatgtgtctattttttggctttttatatgtgcaggactatatataaagcatggaatatcataattatctgggggaagaactgttttccctgcactaccagctgtatggtcagcaacaattataaatattgtatcagagaaccaaggtttttttttagcttcttttaaaaag

SEQ ID NO: 1711 - DNA, 200 bp, Lawsonia intracellularis
cgatgaatagcatagtctgtatatttgattgcaccagttcggctagttccagaagggacgtcaactcgaccatctggataggtaaatggacgatggttagaggttgtaagcgcaacatggtagaatggtttattagaggtatatgctatatcggcttcacgaatgactgcatcaaataaatcttcatcacatatccccca

SEQ ID NO: 1712 - DNA, 200 bp, Lawsonia intracellularis
ggcatttgtaaacgttttatactcatctggaatggttgatcgatctataatacgaaaaccatttcctgaaaaaaattcattcatgttatcaaaataaccatacccaccatagataaaaacagtatcatatcctctttgtcggaaaagtgttcctgtattaaagaggttatgattatttggtctacgaacaatagatgcac

SEQ ID NO: 1713 - DNA, 200 bp, Lawsonia intracellularis
ctggtgtggggggtagacttaagataattgcttcaagacctcgtacagtacgagttcctgtagctttcatatttgtgaaataaagacattttttactaagatcatttaagtgtggtgtacggtctcctaaagagacactccctaagctttccactacaatagtaataacatttaaatgtttttctggactattagagtgt

SEQ ID NO: 1714 - DNA, 200 bp, Lawsonia intracellularis
atgtatcttctccactccatagagttgtcattgaaaaatacactatttggttctattaactcgtgatgtaggagttcaaaagctaattttttatcaattacaggataaaattgtctgtaatccaattgattatttctaaatgctgaaaatagtgaccatataccatttttagaaagttcttgacttaaggcattattaga

SEQ ID NO: 1715 - DNA, 200 bp, Lawsonia intracellularis
aaaagtaggaggtgaatatatagtggttatagatgcaagaatgatccaaacactaaaaaaccatcgtacactaggcactggtatattattaattttttttgcaataggcctaagtagtatccaagacacaccaagagagcataaaaggatacctattaaaatagggataataggatatgactctataatattttttacaa

SEQ ID NO: 1716 - DNA, 200 bp, Lawsonia intracellularis
cttcagttgtgtatataagataatcaatagctataaagttaaatcgacaatgcaattcatcccaaaataaatattcagcagcacctgtaaatagaaaaacagccgtatagagactaaatacaaaaaataaaatttgttgagtaatttttccaactacacgtgaaccagttaatagtacacatattgctaatggaagggtt

SEQ ID NO: 1717 - DNA, 200 bp, Lawsonia intracellularis
ataaggataaaaggaaaaacatcattaataaagcctacactaagtatcaacggaattgaataaaatgagtctatagcactagttcctacatgaataagtaatacaactcttacaatttgattaatactttcataaataaaaaataatagtccaagataaatacagcgaatatatttcataattgtattatagatgttttt

SEQ ID NO: 1718 - DNA, 200 bp, Lawsonia intracellularis
tggaagatattgctttaactcattattatattaaatataaagagttagctattaatttttaactaacttatcatgctttttgaagtgtttataaaataaaaatttatatcattgatattgaataaatcatttacgttttcttctattatagaagttttgatgcttactatatataatcactatttatttttacactaaca

SEQ ID NO: 1719 - DNA, 200 bp, Lawsonia intracellularis
atataaagttcatagaatgcataggttagccattctacataaaataatttgtttaatattattttcataataataacaacaattgatataagtctatccaaaaaatagtatagatgcaattcaatatatatatatattctatatactagtaagttcaaatagatagataatatgagtgaacagatttatattaatagata

SEQ ID NO: 1720 - DNA, 200 bp, Lawsonia intracellularis
gtcatattgacaacttactcaataagtagatgttagctatttggttaaaaaagagttatcctaagatttttgaagttagattatattttttattactttactacatacgttaaataagatatgtctaaaattatatttcttttttatatttgttattaatcaggataattttaactataaagcgattaagtaacttgttt

SEQ ID NO: 1721 - DNA, 200 bp, Lawsonia intracellularis
gactataattatataatattatactctattctgtattaagtaaagttaagaaagatgatcttaattaactatctaagcttattagtgaactttggtgtgttaaccaataataattattaaataaaatttattatttctacagaaataataacacttaagtagattaaaaatattattataatagataaataaatcagaaa

SEQ ID NO: 1722 - DNA, 200 bp, Lawsonia intracellularis
aaatttagctttatataaatttattaaatttaccattgttatttaagatagagctcaccgttaaaagagtaatatgtaaaagtacaataagaggtttttaaaaatgctaatgttaattaacgtaataagttataagaggtatttagcatggtaaagttaaataatgtaataaacttcaataaaaaattagcaaaagttaa

SEQ ID NO: 1723 - DNA, 200 bp, Lawsonia intracellularis
tgtaactagtctttctatgctactttttaacttcattgctattttctttttaattcaatcagatgcttatgcagtgatttttagtaatagtcagccacggatatttacagatgttaacactccagctgaaacttattttggtggttttgatatgcgtgatccaagaagccctattaattcagggccaactagtatgactt

SEQ ID NO: 1724 - DNA, 200 bp, Lawsonia intracellularis
ttaccacgcataatttagcccaaaaccaaattcttgcagcttctggtggtagtatgggtactgctgcacgaggaagtgtagttaatggtgatgcaactattacaatgcataatactgtatgtaactttttatatggtggtggttactctgaaggtccagatgttgtagttactggtacagctaatatctctgtctataat

SEQ ID NO: 1725 - DNA, 200 bp, Lawsonia intracellularis
tcacaacttatagatatctttggtggaggttttgataatggtggacacaatggtcatacaagtgtaggtgctgtaaagattttagtagaccattctgttgttcagaatttgacaggctcagcttcatctgttggtattgagtctcaaggtcgctatgctgtttttggtgatgtagatattgctgttgttaatggttcaga

SEQ ID NO: 1726 - DNA, 200 bp, Lawsonia intracellularis
tgttacaacactcacaggtacttctacaagttcagctcatattaaaggaaatctctcaatccttgtagaaaattcgcatataactgaccttaactgtgttgatcatgctttattggatgggaatctttttgttcgtattggtcctggagcattggttgatcgtctcttcctttctacagaaaatcttcctaagggttctt

SEQ ID NO: 1727 - DNA, 200 bp, Lawsonia intracellularis
ctttatttgagattgatggtggtagagttgatggtttatttgttggtccctatgctggaactttaaatgacgcaaaagttttaatgaaaaatggttatgtattgaatcttgatccatcaccaagaacgcctgcaggtgtaataaaaaatttagacatatttatggaaggtggaaccattgcttggttaaaccttgctcca

SEQ ID NO: 1728 - DNA, 200 bp, Lawsonia intracellularis
caacaaggtgtgtctcataacgtcacattacatttggatgggggtacagttgaaaatctccgatttggtaatttccctggtgctaattttgatggaataattagttttgcaaaagcagaagtaaaaggtggcactatagagaatatagagcctttaagaagaggagtattaaattctagcttaatttttattcctggtgg

SEQ ID NO: 1729 - DNA, 200 bp, Lawsonia intracellularis
actatcaagagttcatacagttgaaaatgggagaggtttaggccttagtaatgttacagtacaagagggtgcaagaacggtttgggggctacctggtaatcgatttacaattgaagcagatgattttgatctagggggtactattatccttccaagtacggatagtacaatagagctagttgtaaataaccatttgatag

SEQ ID NO: 1730 - DNA, 200 bp, Lawsonia intracellularis
ctagtggtggaatgtttgaaattaatgatgcagatagatctagagtaacaccactagttgtatttactggaaatcctggaagttctgtaaatattatagatcctctaagtgtaaacttagatcttcctttaagctttttaggaactagtggtattgtattagctcaagctacacctaatcttgctgatcccaagttgttt

SEQ ID NO: 1731 - DNA, 200 bp, Lawsonia intracellularis
gaaccaataatacataaaggacttatgtggggagatattgtttttgatgctacttctaacacatggtttattaataatattcgtgaatctaaggattactatggatatttatcagtccaaggagcatcaaattggttacgtcaacagcatatgataacaacacaaagacgttcagccaacgcactgttacataaacatga

SEQ ID NO: 1732 - DNA, 200 bp, Lawsonia intracellularis
tggactttgggtagatattcaagctggtcatgaaaaaattggtacaaactatggtaattcaaagatgccatgggttatggcaagtgcaggatatgattatagaaaaaatattaatgataatatagctatgttatatggttttgctcttggtataggagatggtcatcaaaagtggactcttgttagtaagatgaaaaata

SEQ ID NO: 1733 - DNA, 200 bp, Lawsonia intracellularis
ggattaccatggggctactagatggatatttaggatttagttataatccaataggactatatggattagtagcactacaaggttcagtaagtaaaataaaaacaaaaagtccaggattttttgtaaatgagaactggacagaagtagtcccaacagaatctttagagctaggttggcactatgcctttaatgagttcttt

SEQ ID NO: 1734 - DNA, 200 bp, Lawsonia intracellularis
actattactccaagggcacaaatgattttagagcaaactcctaaacattctattgaattttgttgtagaaaaaataaagagaaaattaagcttcatagaaatacaacagtaacaacagttgctggtattttagctaactataatattgaatggctggatattcatggtagtgttgattggataaaaggtgttgctggtac

SEQ ID NO: 1735 - DNA, 200 bp, Lawsonia intracellularis
atataaagctcactcagagcttttcaataagacatttaaagataaaaataataatagtgtattgcgagcatccttaggatgtgattacattatcagagaaaatatgagcataggaataactgcctttggagatatgattaataataaagggattggaggccaagctaatttctcatataaattttagaacaatagtttta

SEQ ID NO: 1736 - DNA, 200 bp, Lawsonia intracellularis
tttgttgataaaatatattgtcctaacctattaattagataacttaaaaaagatgagagaagcttaaagcttctctcatcttatattttaaagaattaatgtaatatgttaagttatattaatatcatagtatagttaaataacttttttagttttttatccatgtaaaaaatttaattttttacattaataagactata

SEQ ID NO: 1737 - DNA, 200 bp, Lawsonia intracellularis
ttcttatcacttacttcttttgatagtttattacaaatttgttaattaagtataatatattatgttactgtgtacgtatcacttattaatatttattgtatagttatttataactaatttaaaatagtaggtaagaattaagtataataagtttttatgtagaatttaatctgactaaatcaaaaaaatctgtggaaaat

SEQ ID NO: 1738 - DNA, 200 bp, Lawsonia intracellularis
atttactgtaagtatagagggttagattgtttattttagattatgttttttagtctaaacgtaagattttttattagaggagggagctctacggattttgctgaagcaatagtttctttgggtgaaagaactctcaaatttaaagagagtttgcatatggaagaagcaacaaaaacagcgctcattttgctgtttattaa

SEQ ID NO: 1739 - DNA, 200 bp, Lawsonia intracellularis
aatattaggttatgacattattcaatcctttagaagtcattcctgaatttgttgctgatattcctggaatgaaaggagaaaaagttgactatgctattatgcgtgaaggtaatcctagtataatgatagagtgcaaaagttgtggcttctaatcttgatgaggttaagtgcaatcagttatatcgctattttgttacaca

SEQ ID NO: 1740 - DNA, 200 bp, Lawsonia intracellularis
agactctattatagctattttgatggatggcatttggtatatgttttttcctaaagatactgaaggcaaaaaaatggaagaaaaagcatttatggaggttaatcttaaagagattgacccgaccttgcttccggagttgcgcaagttatgcaaaggccgttttgatttgcagaaaactcttgaaactgttcatgagttga

SEQ ID NO: 1741 - DNA, 200 bp, Lawsonia intracellularis
aattcaatcttaaaattaaattgttgctggtgaataatttggaggaaccccaagaaaactttgtcatttacattacaaaagaatttgggattaaagcacaacaaaaagcaattgagctttacaggttatgttaaacgtgccttgatggagtttgtggacaagcaggtgatgcaagattgaaaaaagcacttgtggctacc

SEQ ID NO: 1742 - DNA, 200 bp, Lawsonia intracellularis
tctaaaaaagatgacacagatacttctattgtaacaagttcagaaggagaagaacaggatagtcgaattgtaacaactgatgaagaaagggaaggatttcagatttaaaggctatcatgagtaaagttattgatcctgatcgtgtatatctgcgtgatactgttagctattgtggtatccttctggataataagaataat

SEQ ID NO: 1743 - DNA, 200 bp, Lawsonia intracellularis
aaacctatttgtcgtttacatttcaactctattaaggtgaagtatattgaaacttttgatatagaaaagaaagggaccaagcacaaaattgaaagattgtctgatatctacaaatatgaagacatattacggacaacttcaggttattacgacaaaagttaatattttatttatgttacgattttcctgaagttaggtgt

SEQ ID NO: 1744 - DNA, 200 bp, Lawsonia intracellularis
ttgaaaacactgtgttattatatggagtagtatcaacataaagttgatattgattctaactctgctttattttgttttagttgttaaactatgactatctgtttttttatttaaatggaatagatcttattttttatacaatataaaaaatatcttgaagaagataaaaactaaatagtttcattttatgttgaaaaaag

SEQ ID NO: 1745 - DNA, 200 bp, Lawsonia intracellularis
agaaaagctgttagaaggtttttaatgaatattttgatagttatttggttgcgggggaaggatttgaaccttcgaccttcgggttatgagcccgacgagctgccatgctgctccaccccgcgtcacttaaaaagaatatatcaataactatggttaatgtaaatagtttttagttatttctaacttattagtatgaaatt

SEQ ID NO: 1746 - DNA, 200 bp, Lawsonia intracellularis
ttttattatttaattataacaagtggtttaagtgtatattaataattaagatatattgtctacttctttattatctttttatttttatgtaattttaatactaatgatagtaataagaaaaagaaaagtgaattatattataggatatgttgttttttcctaatgtggttggaatattttatttaaacaataccattttc

SEQ ID NO: 1747 - DNA, 200 bp, Lawsonia intracellularis
tccagggcgtgtatatataggagtagtagtatgttgaatatattgctgtgtatctccaaatataagaaggatagggcttgccacaaaaatggaagaaaatgttcctataatgataccaataatcattgttaaggcaaagtcatgaataacagtaccacctagtatgaagagactgaaagcagttacaaaggttgtaaaag

SEQ ID NO: 1748 - DNA, 200 bp, Lawsonia intracellularis
aagtcatgatagtacgccctaatgtttgattgatactcaggttaataatatttgaaaggggaagatagtttttctgtttttgttcttggagattttcacgtattctatcataaacaataattgtatcatttaaagaataacctacaagtgtaagtagtgcagcaataacattgagatcaaattcttttcccataagtgtt

SEQ ID NO: 1749 - DNA, 200 bp, Lawsonia intracellularis
aataatcctacggtaataagaacatcatggagtaacccaacaatagctccaagggcaaagttaagttttaatttccaacatagtagaatagtaagtataagtgcaataactaccttagtcaccatagaaaagtcaaaaagattcatacaatacattgcagcagctaaaactcctgttatgccagctgctattatccaacg

SEQ ID NO: 1750 - DNA, 200 bp, Lawsonia intracellularis
atgttcaaatcttcctgatatataaattgtaataagaaggatagcataaaatatagcttctaatgctgaattccgtaaatcagcaccaacttttggcccaactacttccagtcgttgaatcgtaactggattactaggagaatatgtatgtaatattgtacttatatcagatttaatagtcatactgttaaattcagaag

SEQ ID NO: 1751 - DNA, 200 bp, Lawsonia intracellularis
atgaaaatcttacaagatatgctttattatcttctccaaattgttgtattgtaaggcctggaaggttaagttttgtcagtgcttcttttatatgttcatcttctataggttgtgaaaattggagttggacagctatacctcccgcaaagtctacaccataacgtactcctccatttacaataatggttctgattcctatc

SEQ ID NO: 1752 - DNA, 200 bp, Lawsonia intracellularis
aaaataaatataatagaaataatataggcaagatgccgctttgcaacaaaattaatatgtgtttgtctttgaaagagttcaatagtcatagccactcctaaacacttaatgtttttttcttacttttgcgtagccataacaaaaagcaagtataagaaacaaaaatagctgtaaacatagaagcaataatacctaaagat

SEQ ID NO: 1753 - DNA, 200 bp, Lawsonia intracellularis
aatgttactgcaaaacctcttacagggcctgttccaaattggtataaaattgctgcagcaataattgtagttacatttgaatccatgatagaaatactagcacgatcaaatccagctataactgcctttaatggcattagtcctttttttagttcttcacggatacgttcaaaaataagaacatttgcatcaactgacat

SEQ ID NO: 1754 - DNA, 200 bp, Lawsonia intracellularis
tcctattgtaagtacaataccagcaatccctggtagggtaagtgttgctccaaaagcagctaatcctgctaataaaagtgtcatagtaaaaagcagcataacatctgcaagtaagccagaaagaccataataaagcggcataataataagaacagcaaatcctcctacaatagctgctaacatccctttttcaatagatt

SEQ ID NO: 1755 - DNA, 200 bp, Lawsonia intracellularis
cttccccgagggaaggtccaacacttctttcttcaagaatagtaacaggtgcagggagagagccagctcgtagaataatagataaatcttgagcttcagccatagtaaagtttccagaaatacttgcttttcctccagatatacgttcttgaatagttggggcactatatatttttccatctaagacaatagccatacgc

SEQ ID NO: 1756 - DNA, 200 bp, Lawsonia intracellularis
ttttttatattttctgctgtaatacgctcaaacattttagcaccttgagaattaaatgaaagtgctacataagctttattgtttttatcatcaaagttagggcgtgcatctgaaatgttttctcctgtcataactggttcacgttcgagtgggataagaatttctcttgaagttccgtcagggtagaaaatgacttgagg

SEQ ID NO: 1757 - DNA, 200 bp, Lawsonia intracellularis
aaataagcgtactccagatggaagaggtgtattttgttgtaagtcatcccttacaatatgaaaggttaagtgggcggtttgtcctataagatgtatagcacgtgtagagtctgttaaaccaggtagttgaatttgaatacgaaagttgtcttgttttcttatatcaggttctgaaacaccaaattggtcaattctgtttc

SEQ ID NO: 1758 - DNA, 200 bp, Lawsonia intracellularis
ttatagtacgtatggcttgctcaagggccatgttttcaatagaaattttagcctgttgtgtgaagtgagcataatattttaaactaccatcaatagtcgtaggttttgaaagaacaagttgagggtaactttttactattaattcttctaggtcattttcttgttcttttctaggtaataaaaattctagttgtccatca

SEQ ID NO: 1759 - DNA, 200 bp, Lawsonia intracellularis
ggagttatttttgtctttaagatagtaagaccatttttagatgcagtactacgaagatcttgtcctgttaatacaagagcattagacactgcagtattaacatcaacacctagtgtaaggtgtattcctcctttaagatcaagaccaaggtttattttagtatcaggtaggtatttacctataatagagttatcaataaa

SEQ ID NO: 1760 - DNA, 200 bp, Lawsonia intracellularis
tgggatacttggaagaacatatattatgcttaatattaaaataaagagcgagatagtaattcgccaaggaagcgatttcatggattgtcctcaagtcaaatatacctagttatagttaactattgtatagctaatgtttctattgacttttaattctatcatagtgaatgttataaatgtaaggtaataaaataactaac

SEQ ID NO: 1761 - DNA, 200 bp, Lawsonia intracellularis
tacgtgtagtttaattaaaggctattataggttatttttcttctttagttaaagaacctttttgatctactagtccaacaacatatgcacggttaatttgtacggttgtatgaccaagatctgttgtaatagtatcaccatcaatatcaacaatccgtccaataagtccacctgtagataatatatgatccccttttttt

SEQ ID NO: 1762 - DNA, 200 bp, Lawsonia intracellularis
aaggcttgtagcattgccttatgttgttttgtacgtttttgttgaggacggataagtaaaaagtaaaaaatagctaacattataataagaggaataaactgcataaatacattactaggttcccctgaagaaggatcaggagttccaaaagcatgagcaatagaaatcataaaatctcctttttatattaatagctttaa

SEQ ID NO: 1763 - DNA, 200 bp, Lawsonia intracellularis
acacagctactagtcatgatacataaaaatataactaagaccatctatgtatagatttaagttaagattggcaagaggaggtaggaaaaagttttattttttgatgtatatccaactttatattgagttttatactaatctaatagtaacctttagaaattgttagctagtgtatctgttaaaaaaaaattggatattta

SEQ ID NO: 1764 - DNA, 200 bp, Lawsonia intracellularis
aattataataaatactcaatgagcttttagtattactctcttagttaagggggatgtgaaaaaccaatatataagtaaggttagattttatttaaagaagataatattagataatagtcaagtttagttaattttttattactatatttagtaaatatagctagagataaaatatattttagtaaatatatcagctagtt

SEQ ID NO: 1765 - DNA, 200 bp, Lawsonia intracellularis
gcctaataatgctctttaattatagtgtatttttatataaagtagaattttgttagcacctaattgtaggtagtttttataatacagttatgggtaatgttaagttatatatagacattttttaagaatatatctattttgtatttacaaaaatggttatagtgataaattttaatgaacttactataacctcttgacag

SEQ ID NO: 1766 - DNA, 200 bp, Lawsonia intracellularis
tcagttgtatttcacaatacttgcggaatacaagttgattacttgttgtaaaaaagacttattttgaggaataaacatgaaagccgaaacaggcgtaataaaaattataggcgatgtaaccccttactctggagcaggagatagtcgagtaagtattcttagtgaagataaagagtatcggatagctcctcgtggagcag

SEQ ID NO: 1767 - DNA, 200 bp, Lawsonia intracellularis
gtattgatcttatagatcatatgagtgcttctgttgaagtagaaggtattgtttcagaagatcaggatggagcatattgtattcatgtacgttcttatcgtttgctagatgcatttgatgctgaagactggtatgatgataatgagtagttataatatataatatatattaacactgggaaaatgaaataggttatgtaa

SEQ ID NO: 1768 - DNA, 200 bp, Lawsonia intracellularis
aagtattaaataaaattagggaagaagtaacttcagtggagctgaaaaaatatcttgtattaatcctatagtatctctcccaagagaacctatagtactaagaattaacttggccgcattaattgttctttttgggttatctatacttcctgtatattttatggggatagctataggaaatccttccatatctatagtga

SEQ ID NO: 1769 - DNA, 200 bp, Lawsonia intracellularis
tgaggtagtcaagattccattcaggaagatcaatttttccactccctgttattaccattccaggccctgttattgcaaaattattatttgtaataataccatttataatatttcctgttgcaccaatgttactaaaattttgttgagtagtagtggtgtttcttttgaaatagccattctggataaaaatacgccatttc

SEQ ID NO: 1770 - DNA, 200 bp, Lawsonia intracellularis
ccttgaagatttttaaggaaatctatagatgattttgctattgactgtatattaataacaaatgtaccaaggcctgaaataagatattcttgttgacgttttttacttagtttaatcatatccacaccttttgaaatataatgaaaatctatctgtgcactattgccattagttgaaagagggcaagccttaaagcttgc

SEQ ID NO: 1771 - DNA, 200 bp, Lawsonia intracellularis
ttctgtttttccatcacatagtgatgctgtaattggagtgatagataatgttccttgattaagactaatgggtactactacattagtatatggaacttttctatagataagctcagctagagtcagtgtagattgaatatttactttattcagcaattctatcggccagagttcctgtgattttttcagtttattttggt

SEQ ID NO: 1772 - DNA, 200 bp, Lawsonia intracellularis
taattgatagtaaatatttatctaagtttaatgaacttagttggatatctcctgtccaacttggagggtttgtctgtaatccattgagagaaaatttaatcagtgtattatctaatattccctgtatatttgtaaggcgaattgttgcaggagaaataaagatatctccttgcaatttacaatattgcaacatagttgga

SEQ ID NO: 1773 - DNA, 200 bp, Lawsonia intracellularis
gaaatattttttggttcataaccaagtttacttaataaatttctaagattttgtgtcatgacagtgagagaaccctcccattgtcttgtgttacttgtactagaactagttttgattgttccagatagggctgttttaggatgtatttcaccttgaaaattagagaagctaagaaaactattatctatgtcaaaagatat

SEQ ID NO: 1774 - DNA, 200 bp, Lawsonia intracellularis
tcctccataagccacagcttgtacgccagatacagaacatacaacttttgatggtatgttttctgctttaatagaaagccagtcagtggttgaaaattgtattaacccatccattgtaattgagccattccatcttgctgatgatatctctgcactccacttccctttatatggaattgtagaggatttatttccctttg

SEQ ID NO: 1775 - DNA, 200 bp, Lawsonia intracellularis
atggttgaccaatactgtcacatgttagatgaagcatagaaaaaggaatagcttcagacgctgttttttttactaatccatcagttacatataaatcaattgtaccttttagacttgaaagaaatgatgctaaagtatcaccatgtccattaacacgacttgtgccagaagctttaccttttagttcatattcttttgta

SEQ ID NO: 1776 - DNA, 200 bp, Lawsonia intracellularis
ataatatttgttatatcagacagttgaatattttctatagctaattgtattgtgtgcctattagatagtaaaagtgaggaagataaactgccatcataaaaatttttacagttagtatgaatctgagtaccctgaggtttaggttgtatgttacatataaactgatatccatcaaatttccaacatgttacatgatcagc

SEQ ID NO: 1777 - DNA, 200 bp, Lawsonia intracellularis
ctgaatagtaatgtcatagttgattgttttttttatattattattattattattattatggagattacttaagatagttaaaaacgtttctttaggataggatagttgtgaagattttttaccctttagttctggaagaagtgtattaaggttgaactgttttgtggcaagggataatgtaatcgttggggataaaaaat

SEQ ID NO: 1778 - DNA, 200 bp, Lawsonia intracellularis
tattgacagttccattcccttgaaatgtagtatctaaagaatgaatgattattttttgggcattaacttgttgaggagataatgtaaattttatttctccagataattgattaagagcatgttgaataccatttggtagttgccttgcaaaagtaaaccaatagggaaaactaaaattttttacatccattgttccatca

SEQ ID NO: 1779 - DNA, 200 bp, Lawsonia intracellularis
aaaaagagatttgatagtgtatcataattttttattgttccatgaagatctatatgagttttatcaaaaagtagttttgagttttttatcagcagtggaggaaagtgtgtcatgtcctcagaagatgttgttgtaaacggaacagataatagtataggaatggatgtattaccattagggagtgttccttcaatatgtaa

SEQ ID NO: 1780 - DNA, 200 bp, Lawsonia intracellularis
ctgcccatgcattgtaagtttatcagagttatctttttctagttttgtcgtgaagtcgaatgtaatgttattagctgtattggttgtaggtatagcccctgaaaccttaaatgtagtttttttagtatttgtaaataaatcgtataaaggagaagtatcatgaagtaatgctgtatttattttatacggcatatcctcta

SEQ ID NO: 1781 - DNA, 200 bp, Lawsonia intracellularis
tgtggagctgtactttttcaatacttttttgtgcagtgctagaattattacttacagtattcattatttcccagattatttcatctgcagtgagctttaatgagcttgtaagtgtcttagaaacaccaattttaccattaatacctattatcttaaaacaatagtcattattttgaaaggtaatactaccattttcaata

SEQ ID NO: 1782 - DNA, 200 bp, Lawsonia intracellularis
aaaagtttactatctgtaattaattggagaagatgcgaaacttgttttggtatagcatatcctgtggttttactattttttttttgttcattttgaagaataatggaggctattggttggattacctcaatagaatatatagaaatgtttcctgataatatgttggtgatttttggagtaatcaagcattctttaatatg

SEQ ID NO: 1783 - DNA, 200 bp, Lawsonia intracellularis
aattgtatcacctttttgtgtttgaagtataacatttgttaagtaaagcttaggaaaaggtacaatatgaaacccaatagaattagcagaaatagaagtatcctttaattgttttgaaatagtagaaagtattttatttgtaatatattgtggatgttgtttgataaagtagaatgtaataccaaaaaatactataattc

SEQ ID NO: 1784 - DNA, 200 bp, Lawsonia intracellularis
ctaatagaaagagagtaactatactaatgagaaaagatctcatagttgatactccaataaaaatataaagattatattaggtatagaataaagcttattcaatggtatgtattcgttttaagtctaaataaataatgtaaccttttacaggtaatgatgttgtttcttttatgatatccaaatatttctgtaattgttgt

SEQ ID NO: 1785 - DNA, 200 bp, Lawsonia intracellularis
atatgctgtagggatgtttctcctgttttatattcaataacagaatattctttaccattattaaccagaagatcaacacgataaatattgttatttttatcaagaagtgtttgttctgcaagtccaaattgtatccaataccttgtttttggtagagaagtataccattgaagaatagatagcacgtcttttacaataat

SEQ ID NO: 1786 - DNA, 200 bp, Lawsonia intracellularis
attatattgtgaggatggtaaagggagtggaaatcgttttatagcataatctatagcaagggagatatctatatttggattttttgatatgcataaatattgtaaacagtgatgtataaaagttcctcttcttttgctcgtaatacctagttcattcactggattacgaaaaatacgtaattgaggtaaccagtgcatag

SEQ ID NO: 1787 - DNA, 200 bp, Lawsonia intracellularis
gtctccaactagatgtactttcatcttttgtttcaagatatatgtatggtatttctgtactgtttttattagaagataacattgctgtatgattagaagtatatgttttttcacctagttgatagatattattatcccagctgagatagtctagtatggggttaatggcttcagcaaatgatatttttttagacttagtt

SEQ ID NO: 1788 - DNA, 200 bp, Lawsonia intracellularis
gatgtaatgagtgcatataattcttcttcagctcttgtccatgcaacatataagaggtttaatgattcacaaacattttttagtaaactgctataatattcttttggcatggctggtgattgttttacaataatattaaaaccatcaacacatgtttgaataagtgaatcgttaggtttaagaggaaaatcatgccatgg

SEQ ID NO: 1789 - DNA, 200 bp, Lawsonia intracellularis
aataatgactataggaaattgtagtcctttagatttatggattgtcatgattcttacggcagctatattttctggcattggtgttttttctttatgaccgtgctgtttccagtactctaaaaaatttgatatagaatcatatccttttgtacttgctatatagataatttcaagaaatcttctaataaaagacatttctt

SEQ ID NO: 1790 - DNA, 200 bp, Lawsonia intracellularis
ttggaaatcgtttttttattttaagccggtcaatagattcttgtattgcatcataagcagaaagtaatccagaatcgtcataaaaaggaagaatccaatgttcccatgcatctggaaagtcagctttgaaagcaaggtataagggttgtgagcgatttctaatacatatccattcatctaatttttgttgtgggatatta

SEQ ID NO: 1791 - DNA, 200 bp, Lawsonia intracellularis
agaagaggttgaacaagatttcctccatttattattctccaaaaggcaagatcattttgaggtgaatctaaaaactctaatatagcaataaactgaaggataattggatgctctataagtaaaaagctattttctgtcactacaggaatgtttttttccatcagccagttggctacttgcatagcccttttattagatct

SEQ ID NO: 1792 - DNA, 200 bp, Lawsonia intracellularis
aacaagaatagcaatatcccccaaagagcgacgtgtttgaatatcatgaatgatatttattaatctatcatgaacaacagtgtcaggatcactttcttcatcatttagtatacgctgaatatatacatatccttcttttttgtttggagctatggattgttcagcatctgcaaaagactgagttactagaggtacttgct

SEQ ID NO: 1793 - DNA, 200 bp, Lawsonia intracellularis
ctgagagaatagtattttttattgttggtgcaatttcattagggagtatcttagagaaaatagattgaactatattgtgatcagataatttagtaaaaagagtattatttgtattaacaatatgatatgcgcttctccagtttataggtaagctctctttttgaacataagatgctatagattgtagctctggatcggat

SEQ ID NO: 1794 - DNA, 200 bp, Lawsonia intracellularis
aggactttttcaaagagtgttgtatcaccacctctccaaccataaattgcctgtttaacatctccaacccatgttaatgatcctccataggaaagagcttcaacaacaaaaggttgaataacagcccattgttcatggcttgtatcttgaaattcatcaataagaatgtgttgaagatttgtcccaagtttacagaatat

SEQ ID NO: 1795 - DNA, 200 bp, Lawsonia intracellularis
ttctgatataccataatgtcctgagactgcttgttgtgccaatgaaggaataagttcagcaaggataatacgttgtttacaaaaaaattctggtagtaggttatataattctttagctaatttaacataaggtatagttttttgagagttttttaataatactcctgttgtatcaagatatgtaattagtgattgaaggg

SEQ ID NO: 1796 - DNA, 200 bp, Lawsonia intracellularis
tattataaagtgaaatagtatgatgactaggggtattttttgaagatttgagtatacagtcagttaggtttggtttacgtaacattgtagattttggtggaattgtatgttgtgttcctatctgacaagcttcaagagcttttttaaaatttgaatgaatggaaagttgttcgtttttgatgcaagatgcaagttctgtt

SEQ ID NO: 1797 - DNA, 200 bp, Lawsonia intracellularis
gctattttttttactgattgaatttttattgtaagatgtgctgtaatttcttgaggtgaagttatttcttgttcaccatttataagtagaggtagtattgaaagaactttttctcttagagtagatccaatcataaaattgttatgtttagtatgaaataatatatcactacaggcttcttttagtataatataaagtct

SEQ ID NO: 1798 - DNA, 200 bp, Lawsonia intracellularis
ttcgttatgttgtgtttttttaaggatagagtctaatagtggtgttagtgcttcttctgtagaaaaaataggttgaaaatcaggtgggagatgaagttctaatgcagtactatgcacaatagtatgaagtaaactatcaattgtacatatgttgagttcactataattgcgtagaaaaatattaatccaatgtgctgctt

SEQ ID NO: 1799 - DNA, 200 bp, Lawsonia intracellularis
gtgtactagttaagcctggtattggttgagtattgagtgctgcttgctttaatcgagttataatacgctgttgcatttctgcagcagctctattggtaaaggtaatggcaagaatacttgtccatgaatgttcatacttgttataagaagagtttgtgttattgtcatttatacttttatttagaagactaagaaaacta

SEQ ID NO: 1800 - DNA, 200 bp, Lawsonia intracellularis
tatgtgagttcatatgttttcccagatccagctgaggcacgaatttgacgaagaagaggaaagtattcttcatatgatgacttttgtatgttcattttcttcatttgtgagaggattacaatgaggaagcatacctgtaagccttccttgaccagtggattcaagtactgctcgccaaagtcctgactttgtattaagtt

SEQ ID NO: 1801 - DNA, 200 bp, Lawsonia intracellularis
ttcgacgttttttgataaccatatttagtgggatatgaacatagttgtccataatatttgctactaccatgtttgttttacctgccatagctgcatgtacagcatattgtccaagaaatccacagtaaactctatcattagcatttgctggaactgatcgtataatatagcttggatcaataagctttagtataataggt

SEQ ID NO: 1802 - DNA, 200 bp, Lawsonia intracellularis
atatcttttttagaaaaataatcttttatagagttttttaacaaagtgctaatatcagctaaaacaggatttccagaaggatctgtttcatcttgactatctaataaatgttgtccagcaccttctgctacaataataacagcatgtgaacgttcagaaagacgtttttcaagagcaggaaggagtccaccattaccatg

SEQ ID NO: 1803 - DNA, 200 bp, Lawsonia intracellularis
gagtgtaaattgtacttcaggaatgagaacaaagtttgcttcttttagtgcaagggctgattgggcagcaataaatcctgattctctacccataagttttacaatgcctataccgtttttagcaccactggcttcaacatgagcacatccaatagcttctgttgctttttctacagctgtatcaaatccaaatgatttag

SEQ ID NO: 1804 - DNA, 200 bp, Lawsonia intracellularis
gaataaagttaatatcattatctatggttttaggtataccaataacagaaatacgaaggttatgttggtggatttctttagtgatagaatttgctgctttcattgagccatcaccaccgataacaaatagaatattaatattatggtgtactagtgaggctacaatttcttcaggttgttgtggacctcgtgatgaacca

SEQ ID NO: 1805 - DNA, 200 bp, Lawsonia intracellularis
agtatagtcccaccaaaacaatggatattttttacaacatctggtgtaagttcaataggtgtatgattaaatttgggaataaacccttctaatccataacgaatgccaattacagaagcaacgctatatgcatagtgagcttcaagaacaatagcacggataacatcattgaggccaggacaaaggcctccacaggtaac

SEQ ID NO: 1806 - DNA, 200 bp, Lawsonia intracellularis
aatagcacaacgtgttgtttgaggttcaaagtataaatcttgtcgtggaccagcaagttcaagagaaagtgtaggtgaagaacctaagtcttctatttgttcttggttaagacaaaggtgtatgtattcgttttttttaatatcgcagtatggtaaaggagagggtatagcagcttctccaagagttttgataggaagta

SEQ ID NO: 1807 - DNA, 200 bp, Lawsonia intracellularis
atgtgactgaaagtgaggagtaatgtgtattagtcatagctaactccttaaaaaaatttgatgagaagttgaaagaaaataggtagtttcttgtgttatacctaatccttaatgttattataggtgtagggttactttcaggcaatgtaaggtatgtaagaatatcagtaaaatatatagtaattgctggaagacaagaa

SEQ ID NO: 1808 - DNA, 200 bp, Lawsonia intracellularis
gaagagaataagtctataaaaaatatggtgagagcattaaatgtagttactagttatagagtgagtagtattgtaccatgtgatttagtaagaaatagataaaagtatactattgcagtaacttggtatgattaatgcagatattaaataaatctttaatcattatgtatgctatttaagataactcttaacagttatct

SEQ ID NO: 1809 - DNA, 200 bp, Lawsonia intracellularis
tttaacttattttttataacttttttaatataatgaagatgcttaaaaggattatacaaataacatgtagattatacttaactaacgataattagaagtattttatgttagttagaagttatggttagctatgttaacaaattgtgttatcctgcagatgctactttattgtagttattactctttattatttttttgag

SEQ ID NO: 1810 - DNA, 200 bp, Lawsonia intracellularis
acttgtagtatagttatggagtaattatatgagtaacactgataattacataatgataaaaaaaacaaataatcttaataaattactatggagtatattgttgtgttttttattagtatgggttgtattaacctttggtattggtatcccatattatggagtacagccaagtaacctgctagagtcattaggttataaaa

SEQ ID NO: 1811 - DNA, 200 bp, Lawsonia intracellularis
agaaggtaacaaaagttaacaataatcaacaggtattgtatacagaagatactcttgatcagatgacattggaggttatgagaaaagataaaaaatctaacttagtgtcatccagtgtacaaactccatatttttttatatggttagagataacttgttaatccaacatcaaaataacattaatttttttcaatcatcat

SEQ ID NO: 1812 - DNA, 200 bp, Lawsonia intracellularis
tttttttgagctatattcctcaagtaaatgttgcaatggctacaattcaattgtgtaaacatgtccaaagtatttctagtagtagactacaattagctgaacaattaatatataatagtgaactcctaactataactaactataactcttatttataaagtatattttgtgaaataaaattcatagttattggagtcgtt

SEQ ID NO: 1813 - DNA, 200 bp, Lawsonia intracellularis
ttctattaaatatttttttattaacctagataaatataatataaaaaggtagttatgttatttttatgaatatgctattactactattattaatagtatgttagattcttaaacagtaaagttattttggcaacgtgcaaaacaacttataatgatgcctcctgcttgtgcaacattaagtgaattaacatctctcacca

SEQ ID NO: 1814 - DNA, 200 bp, Lawsonia intracellularis
tagggatatgtaatatggtatgacatcttttttttagttgtaatctgataccacttttttcactaccaagaataagtagagcagggaactttagttctgcttcaaaaacatttttactatctttttctatagatgttccataaatatggaaacctttttcattagctgtttcaatagctctagaaagatttattgcttta

SEQ ID NO: 1815 - DNA, 200 bp, Lawsonia intracellularis
cttatagggagtcgttcaagacatccaacagcagctctccttgcatcttgaccaagaaatactccattatgtttagggattataactcctgctccaccaagtgaataaagagtcctgataatagttcctgcgttaccaggatcttgtatttgatcaaatacaacaataagcggaaggggtgcatctggaactttatcaaa

SEQ ID NO: 1816 - DNA, 200 bp, Lawsonia intracellularis
taaatcttcaagttctataaatccagattcaaataagcgagcaacaataccttggtgattagtaaggcaaaaacggttaagaactttacttgtggtaaatataaaacgtatgtttgtctggcgacatagatcaagaactttttgatattcttttgagcaaagacccttttgtaaaaatattgtgtcaattttttgaggtt

SEQ ID NO: 1817 - DNA, 200 bp, Lawsonia intracellularis
ctttttcaattaaatccaaaactggcttaattcctgacaagatagaaatagttgagagaaaatctagagaatattcagaaaaattggggtgttgcatcttcgtaagctgttttgtataaggtaattggcgatgttttttattatgttgttttttattttttagatttgttatctctttcatcttatttatactatttagt

SEQ ID NO: 1818 - DNA, 200 bp, Lawsonia intracellularis
ttattggtgaattttatcaaaattataagatagttataataaattagtataagctataggtagtataattagtagtcatatctactagttattgtgttttttgtaataaatccatataagagttatctggggtaaaaagtgtaccaagttataactgttatatttattcttaggtcaagagcaatgagaataaaggtttc

SEQ ID NO: 1819 - DNA, 200 bp, Lawsonia intracellularis
tcattacttaatgcttttattacttctactgaactttggaatattagaaggttgtggaaataaaaaactttctggcagtgataggtttgtttctacaaggagttatagccgttgtaaagaagaaaaaacaggtactgtttatcttcctgcagatgacggaacacctttaaataaaacagaattcaatgcttttaattcaa

SEQ ID NO: 1820 - DNA, 200 bp, Lawsonia intracellularis
aaggtcaatttgatagaaatattgattcaaaggatatgagagatattttattacactttaaaaagtatgtacgtcatgagcgtaaaactgttgaaataaatgtgcagcgtgctagtagatatcttcatcatattattaaaacttttaggcaagaaggactacctgatgagttggcgtatttagcttttattgaaagtggt

SEQ ID NO: 1821 - DNA, 200 bp, Lawsonia intracellularis
tataatccatgtgctcgttcttgtacaggtgcatcaggagtttggcagtttacttgtgcaacaggaaagtactatgggatgtccaaaaactcttgggttgataaaaggcgtgatccttatgagtcaactcgtgcagcagctcaatatttaaaaagattacatcaaatttttaatgattggcatcttgctattacagctta

SEQ ID NO: 1822 - DNA, 200 bp, Lawsonia intracellularis
taatgctggagaagggcgtgtttctcgtgctcttgctgctagtggagcaaagtctttttttgagcttagaagacgtaataagtgtattccagaaaaaaatcgtctttctgaagaaggaaagcaatatttacccaagtttttagcaatttgtaagattataagaaacttaaagcagttaggatttgaacctattgaattgt

SEQ ID NO: 1823 - DNA, 200 bp, Lawsonia intracellularis
ctaaatcacagaaaatggttgaattaaaagcaaaaccaggaacaaatttaaaaacactttcaaggcatcttggtatgagttgggatgaattttttgcacataatgcagcatacttaaaacatactactccaccaggtgtacatagtactatttatgttccacatcataaagttcgaatggctcatgcttttttgaataaa

SEQ ID NO: 1824 - DNA, 200 bp, Lawsonia intracellularis
aagtcgaaatctaaaacatatatggcggatagaggaaaatatagagttgttaggggagacactatttcctctatagcaaaaaaaacaggtgtttctattgctgacttgaaagatgcaaatcctcattatggctctttaagggttggtactatccttactataccatcttcgtcaaaaatggtggcaaactatgtagagcc

SEQ ID NO: 1825 - DNA, 200 bp, Lawsonia intracellularis
agaaatatatcaagaaaaaacagttcaggatactaaaaactctcagaatacaaaagtacaattccatactgtaaagaaaggagatacacttttttctattgctaaatattatggtataactcaagattgtttagtaactgctaataatttgtctcatacagatattagtgtggggcaacaactttacattcctatagaaa

SEQ ID NO: 1826 - DNA, 200 bp, Lawsonia intracellularis
aaatatcacctatggcaatgttgaaaaaggatccagagcaagttcagcctaaacgtattgttcaatatcaggtacaacaaggggatagtttatggagtattgctagaaaatttaatgttcctcctattgacctactttctttaaataacttaagccgtcaaagtaaacttcgacctggagattatgttcaagttgctata

SEQ ID NO: 1827 - DNA, 200 bp, Lawsonia intracellularis
aattgattataataataaaagttatgatatgaagagagatgcttaagtagataattaagttagttagtagaaaaaattaagttgctaatcctgagtggagatgattccagcggcagaggtatctttcaattgcattaaagaattcatgaagacccattccaagaagactcattgctaaaattcctgtatacatctgtagc

SEQ ID NO: 1828 - DNA, 200 bp, Lawsonia intracellularis
atattgcctcgaccccatccatccataataagaaaacctaggccggattgtgtggcaaaagattcaaccataaaaagtacggctgtagctgttccactagaaatttttagagctactaaagcattaggtaatgtcgcaggaataataacatgttgtagttcttgtgatggtgttcctccaatagatcgaaaagagtcacg

SEQ ID NO: 1829 - DNA, 200 bp, Lawsonia intracellularis
gtattttttgtcaatgttgagggcacttgctcgggtagcaataagtatttgatagcctgttgtaagtgtgatgagtaaaattttaggcgactcaccaagaccaaaaagagttagaaaaataggaagtagaacaattttaggaatgggatatgttaagaaaatgataggagaaaaaatagtatctactaaatgtttagtac

SEQ ID NO: 1830 - DNA, 200 bp, Lawsonia intracellularis
caagaagtaggccaaaaggaaaagctgtaaaccatgcaagtgccatagcaacagatattctcaaaatacttatacctgcgtgagttaaaaagagttttgtttttaaactattataaaagtagataagaacttttgttgggttaggtaaaatattttccccaataatgatacttccaatcttccataggacaactattata

SEQ ID NO: 1831 - DNA, 200 bp, Lawsonia intracellularis
actatagctaagaggtatttaaatgttgttttcatatattttctttatcacagctagggataggtataaggagttgttggagttttgatgtaattttaaagaatgtttcatgggtacggcaatgtctagtattgaaagtagagttttctatccagtacatagatggagaaggagtaggtgtaagaaccatgatatatttc

SEQ ID NO: 1832 - DNA, 200 bp, Lawsonia intracellularis
cctaaaaatgtagcttctatgatgtcgtgagttacaagaacaaaagttatttttctatgttgccatattttaaaaagtgtattctgtaaccgttcccttgtaatagcatcaagagagcagaatggttcatccataaaaagaatatctggttttgttactaaggcccttccaatagcaactcgttgtctttgtcctcctga

SEQ ID NO: 1833 - DNA, 200 bp, Lawsonia intracellularis
taattgtattggatatcttttttcaagtcctacaagttggagttcttctaatatttctttaagggcttttttttgttcttttataggagtagattggagtaatagtggtaaaagtatattttcttcaacagttttccatgggaaaagtccatagtcttggagaataaaagctatttttttgctatatagtgatacatcac

SEQ ID NO: 1834 - DNA, 200 bp, Lawsonia intracellularis
ctgaagttgctttttcaagtcctgaaagaatatagaggagagttgttttcccacatcctgaaggaccaataatagagagagtttctccagcaggaattttaaaagaaagattatggagaattagagtattattatatattttatttatatttactactgaaataccatgaaagctcattgtagaactatttcctcatagc

SEQ ID NO: 1835 - DNA, 200 bp, Lawsonia intracellularis
taggagatgtttgtaatagttttgaagatatcatccaatttgcaaaggtttctatatcagctgaattaggtaatggttctttttcaatatcaaaaaaaggcatagcaaaagtcataacaacatcttgaggaagcaagtctttgttaaccataagtgtacggtaggtatctgggttagcattgatacgttttgcggcttct

SEQ ID NO: 1836 - DNA, 200 bp, Lawsonia intracellularis
aacaatgcattacgaaaagattgtgctatgttatcacttaatacttctttacgtaatgcaataacagcaaaaacaagattaagtcccttatcatcaaggataacttttgagccattactttctgctaacgatagtaatggttctactaatagggctgcttcaatcttatttgacatgagaagctgtgtgcgtaaagcaat

SEQ ID NO: 1837 - DNA, 200 bp, Lawsonia intracellularis
cctgttgatatcagttagcgggcaacttgttgggggtaaatgagctttttgtaggagtcttgaagctaaaaattcgataatagtagctttggaaatagcaataggtgtattttttaaatcgttaggagattgaattgaagatttttgagaaacagcaataccaaaattgcgatgttgtgttgttgatcgtgctactgttg

SEQ ID NO: 1838 - DNA, 200 bp, Lawsonia intracellularis
ccacaatttgctgtgggacacctgtttcattttggagaagaacagtgacaatatcggtaaaatgtccatcaagcatacctgcacgcatagcagaactaagttcaactgtacttctaaaaggtacaagattcacttcaaggccttgatcagcaaagaggccttcatcaatagcaacatgtaaaatgatagaagatgctgca

SEQ ID NO: 1839 - DNA, 200 bp, Lawsonia intracellularis
ggcagtgtacctatatttatagcactttgggcaagttgagtataactcataataagtaaaaaaagaaaaatgcgaataataatcattcaaacctcatctactgattattattaaaaataaatagttattttataaataagttactttttagattactatatactttttagctatagatagtattaataacttattggtgt

SEQ ID NO: 1840 - DNA, 200 bp, Lawsonia intracellularis
taaataatactaggttattaaaatatatcgttttactaaggataagacaatagctaaaaagacagatatgaattttgttactattttccttattattcaatattattttcagtatttttttataatatggtagactaattaaagaagattatctaattttattatttaataatagttagcgataataagcatcaggtagt

SEQ ID NO: 1841 - DNA, 200 bp, Lawsonia intracellularis
tttttcatattatgaaaggagattactgtgcaaactttaattgttgtaacctatgataccgagttaaaagcagaagaagttagattagactttttaaagatgcaaaaagaatatctagttgcattagaagatgctgtagttgtggtacgtaaaccagatgggaaaataaagctacatcaaatgtataatctcacagctgg

SEQ ID NO: 1842 - DNA, 200 bp, Lawsonia intracellularis
aggagctgttagtggaggtttttggggaacacttattggtttaatctttttaaatccactattgggattagctgtaggagcaagtgcaggtgccattgctggtgctttaagtgatgttggtattagtgatgattttatgaaaaatcttgcaaaacagttaactccaggatcatcagcattatttgtattagtaaattcaa

SEQ ID NO: 1843 - DNA, 200 bp, Lawsonia intracellularis
atattactgacaaggtattagacgcacttcatggtacaggtggagtaatcattcaatcatcattatcccatgcagacgaagcaaaattacaagaagctcttaatggtatgtcatctaatgatgatagtagtaactaatttatttattaaataatagtccatcaatattgatggactattattctttctctttttctctcc

SEQ ID NO: 1844 - DNA, 200 bp, Lawsonia intracellularis
ctacctctgtaattttatgtagctaatgaatcaataaaaaagaagatatggaattctgtatcgatatatcaatttattaatattttttttacttcttataatcttatcttattgacattactcaaaatataacattctttttttgtttaatttataatttactatatgttaaagttctagtgaatagtaataggactaat

SEQ ID NO: 1845 - DNA, 200 bp, Lawsonia intracellularis
taatttagtaaaaattaatagtatatttattataattaatacatacagataataaataatttagtttcttaatttagtttttgatataataaaacaattttatatataaattttacatagttattaataattataattatatgttaagttacattttttactttttacttataccataaaagttaattagcgttattatc

SEQ ID NO: 1846 - DNA, 200 bp, Lawsonia intracellularis
ttaaaaaatattttaagatttacttatataatctaatctaacctaatttaattctaacatattagaataatagtgagttagtataaaaaatatactagcttaatggatgattacattatacagaaactagttattgcgaaaagtaaattttcacggtaagttatgatatatattatgagcttgttgtatataaatttttt

SEQ ID NO: 1847 - DNA, 200 bp, Lawsonia intracellularis
gaaagaaacgttaactaattacttacatgaataatcgctagttattttaaccacttttcattttacaaagtgacattagaaatttgagtatatgttaaggtgattatgataaataagacaactaagcgccataaagcattgcaagaatttcttgctgcccgtggctatgcaactattgaagatcttgctagacattttga

SEQ ID NO: 1848 - DNA, 200 bp, Lawsonia intracellularis
tgtgaccccacaaactgttcgtaaagatataaacagattagcatcagatggaaaagttcagagattccatggtggtgcaggaatgcctcttggctctgaaaacattgtttacgatgaacgaaagagcatttgttcagaggaaaaaaatagaattgcaaggttacttgcaaatcacatccctgatggagcatcacttttca

SEQ ID NO: 1849 - DNA, 200 bp, Lawsonia intracellularis
ttaatattgggacaacaaccgaagaggctgctagagcgcttcttgaacataagaacttaagaatactaacaaatagtttaaatgtagctgctatttgtgcaagaaatagctcttttgatgttcttgtagcttgtggtacagtccgacataaagatcacggaattgtaggagcaagtgcagaacgctttatgagtgaattc

SEQ ID NO: 1850 - DNA, 200 bp, Lawsonia intracellularis
cgtatggattatggtatcataggtatttctggtattgatgaatctggaaacttgttagattatgattatagagaggttgctgtagctagaacgattattgaatattctagagtagtatttttagcaacagatagctctaaatttggtcgacctgctatggttagagtaggtgggttatcaaatgtaaaagctatttttac

SEQ ID NO: 1851 - DNA, 200 bp, Lawsonia intracellularis
tgatggaccattagaagaaaagtggcgtcagttagtggagagttcaggaacagaactttttatagcctgattttataggcttaatttaaataattcattatcctatagtttaactaatctagtatatctttataatctatttggtatatagcaagattatgtttttatatttatactagattgttgggtggagtaagtct

SEQ ID NO: 1852 - DNA, 200 bp, Lawsonia intracellularis
tatagcccccttgaagattaatgtttttttgcatcattttttcaaaaaaatctacttcttctttggagagaaaaggagttgcttctcgactaataatatttacatctggtaagcttatattacctttaatattaggcgtagtttgttgtattgttatattattagtagaggtatcaacttgttctttcaactgactacta

SEQ ID NO: 1853 - DNA, 200 bp, Lawsonia intracellularis
aaagtggaggaatttgtgtttttttgagatctcccaagtaacatagactgtactgatggagcattatcaattttcattacagacctccaatcaatttttgtaagtattaactttttgtaatgtataaagcaataattttattattatatgaatgtgttaacataaatatgacattttactaattcaatataagagtattt

SEQ ID NO: 1854 - DNA, 200 bp, Lawsonia intracellularis
tattaggcatgttacatacaaatataaatatgaattatttaataaattttttattattcaattaaatcataaagatacactcttcataacttattttattatgaaaacagttagttattaatcatgtattaaaatactacaacagtctatattaatctaatatagaacattattataaaaaataatatgtttgatatgct

SEQ ID NO: 1855 - DNA, 200 bp, Lawsonia intracellularis
aatttttgttattaattatatataattagttattatatattcataacttattttattaagttaaaaatattaaaaatagtaaaatacaaaatgttaaaaagtaatgttataagaaaggtatgtatgtaaagtgtatatagagtgcatagttggggtatgaaaaaattaatgtgctaagagtataaaaatattttatttcc

SEQ ID NO: 1856 - DNA, 200 bp, Lawsonia intracellularis
ataatttttttaatatattctggtgatattctaacatttttgtgacaggtgttggcattgtatgatttaggtacactcctcctttccatgcggatctgatatttgaggagcgtatatccattataggagtattaagaaagaaacagtataaatttttaaatattgatgcataacttaccattttgttatgacgatcttgt

SEQ ID NO: 1857 - DNA, 200 bp, Lawsonia intracellularis
attattgtagtgcaattccaaaagcgttttagtgttgatgaaaatgattgttttttgtttgtagatcttggaattattaagaaatttgtaatactaggtagttcaagaccattataccatgtatctagcatggcaaaatcttcatcacttaaaataaaaagtggctgatgaagagtatgtagtttcttccagtaattgag

SEQ ID NO: 1858 - DNA, 200 bp, Lawsonia intracellularis
catgttccaagtgtatgatggttgaggcaatatagattctatagtgttaatagataataatggatttccctgtatagcagcttgcaaaagatccacacgtagttgaaatggaataacatttttagttgttttatgaggaggtaccatacatggtatgaattgtatttgctctagatgcatatattttattgcagctaatg

SEQ ID NO: 1859 - DNA, 200 bp, Lawsonia intracellularis
caatgtttatatgtgctgagtgtacaggattgaatgttcctccaagtattccaataagtttttgattcatgatgctcaatttcattatttttgtttttagcagcttatggttaaatagaattcatcataattttttctttttgaaaatactaattatatctttggttattttttattttatagtgaataatagtatgtta

SEQ ID NO: 1860 - DNA, 200 bp, Lawsonia intracellularis
tgaaagattttttctatttattatctgtatgaactttactttaatttatttgctgcataagtaaaatctactatagatatcttttgtaaagatacattaataaattttttatgctagctgtaattattttttagttattgtatttattatttatgctaactatatgatactaacaatataatgttatattattcttttta

SEQ ID NO: 1861 - DNA, 200 bp, Lawsonia intracellularis
ggttatctagtcttattgatttaaaaaagatatttttcttttgacatatatattgttatattgtatagttaatagagcttatatgttgttaatataatgtttatttggacaattgttccttattaaggtgagttaatgattattccttttcgtcataaagaacaaaattcttcattagaacaaatagctgatccacaagt

SEQ ID NO: 1862 - DNA, 200 bp, Lawsonia intracellularis
agagtatatagaaaattctagtcctttattgtcatttattattagacattcaaaaactattatagctttttttcttatattactaagcatagtaattattgctggagtctggagttggtatagttctcgtgaagaaataaaggcacaagcagcacttggtcaaattttaattaattcggtatctactgaacaatttgata

SEQ ID NO: 1863 - DNA, 200 bp, Lawsonia intracellularis
cattgataaagtttgaaaaaacagctcctactgctttacaaaaaggcattattcttcaattagcattttgggctgttcaattagaacaatatcaaaaggctgctgaagagtatggtatcttatataataaagatcctaaaggtgctattggtattttatcaggccttaatcaggcggatcttttacaaagaactggtaac

SEQ ID NO: 1864 - DNA, 200 bp, Lawsonia intracellularis
tggaaagaagcattaaatgtattattaagtcttgaagaagttgcttcaaatcctatcttaacaggaatttatgagtcacaagctatatgtgctgaacatataggagaaaaaaatattgctatatctgcttataagaagcttatagatgaattaaatataacaggagttgacgctacatactatgaaaataagcttacaat

SEQ ID NO: 1865 - DNA, 200 bp, Lawsonia intracellularis
attaagtaatagttaagaataggatgtataaaaaaggtagtaataaaactattacattaattttgattggtgtagctatagtagattattattttttagtaaaaaagtattgaaatataataattataaagatagaatataaacttttttttgataatataaaagtttatattagataacaaaatagtcatagttaagta

SEQ ID NO: 1866 - DNA, 200 bp, Lawsonia intracellularis
atctatactttttaagtagttattaagatatactaagcttaaatagatattattttgactatttgttatttttagtattactataaactagttggagttaatagaacatggcacttttcaggtaatttttatttattttgccggtaaagtgtttattattattattattattattttaacttactccaattagtggaata

SEQ ID NO: 1867 - DNA, 200 bp, Lawsonia intracellularis
cataattattttttgttataatagatttttatttctattaagtagaatagataactcatatgttgtctaaatagaataatcaaaaactgtataacttttattagagttataacagttatatagcttagggaatagtaagtataatactctatcatactatacttttcagtaacctttaataaatctaaactaaattatat

SEQ ID NO: 1868 - DNA, 200 bp, Lawsonia intracellularis
agttagttattaatctccagaagattaaaatggagggtcttatatggatgattttttaaaagaagcattagatatagtaaaagcacaagccagcgttcgggtaatggcagaagatgaaattatttctatggttcgtcgtctttcttcaggtataaaggttgtttctgaaggtgattgcattcaagaagagcaggcaccaa

SEQ ID NO: 1869 - DNA, 200 bp, Lawsonia intracellularis
cagaattacaaatggatccccgtaagtcagttaaagaaaaatctattacttgtcttgagtgtggtaggacatttaaaattttgacacgtaaacatttacgtagtcatgggcttgacgccaatgaatatcgtgaaaagtggggactaaaaaaagataccccgttagtatgtaaaagtttacaacgtgaacgtcgtaataaa

SEQ ID NO: 1870 - DNA, 200 bp, Lawsonia intracellularis
atgaaagatatgaagctttgggaaaagcgtagaaagagttaataaaagttattattaacttttaactaacatcattaataatgttagctaaaaaaggggggagagtaatctctcccctctttttttaattttttataatagttaggtatactttttctaagataagaaaaagtatcttattatagaagatataaaattct

SEQ ID NO: 1871 - DNA, 200 bp, Lawsonia intracellularis
atatagaatagctactatactaattaaatagtggtcgttctggtgtagatgaatcttgtaaattttctatagtaacatctttaggtggagtaaattgaaatatgttattatcaatatgagtattgggtgtaatattaataaaagtaatagtatttgtatttccataaaaatcaattgattgtactttgtgaatgagtaaa

SEQ ID NO: 1872 - DNA, 200 bp, Lawsonia intracellularis
ctttttttattaatccataaaaatgcctcaaccatttgagtcgttggttcttttgggtataatttaaggaagattagctcattattattattattattattttcaataattgagaagtttttatcaagtcgtacttgtccagtaataacctgaataatagatgtggaatcttttacaatatctgtagagtacttataaac

SEQ ID NO: 1873 - DNA, 200 bp, Lawsonia intracellularis
aaggttttcatcaggaagataatcccatacagcattggtattaataagaagaagttcttcatgaggtgtgtttgtttcccatctgacaagaagtggttttttaaaaaagagtttcccaatacgtgtttctttggacccactttcttgatgagtaagttcttgagtaaatgttgcagaaaagtttttaatggattgatatg

SEQ ID NO: 1874 - DNA, 200 bp, Lawsonia intracellularis
attgctgtaattcttttactattggtatagactctgcataactatctgttatatatgaataaaatataaaagttaaaaaaaataatattagttgtagcatagaaaatttttgtgacatttttttgttcctttgcttaggaaaaattatagtatttataatattcttcaaaggctaatttgaacgtatagtacgtgaacga

SEQ ID NO: 1875 - DNA, 200 bp, Lawsonia intracellularis
tttccacgtattgtaggaggaagtatgccttcttcttccattctttctacaaaacgagcagccttattaaagcctatacggaaccgtcgttgtaatagagaaatagacattctaccttgttcttgaacaaaagtaatagcttcagcatataacgattcttcgtcacttgagctaaaaggagtttttgtatttgtattact

SEQ ID NO: 1876 - DNA, 200 bp, Lawsonia intracellularis
agttgtagtattatttatattgagagggttattccaattagaaaaatctacttcatatactggtgcttgttgttttctccagtattcagtaacagcagttacttcctcatctgtgacaaaagctccatgaagtctttgaatcttcccaccatttggtttaaaaagcatatcacctttcccaagaagttgttctgcacctg

SEQ ID NO: 1877 - DNA, 200 bp, Lawsonia intracellularis
tggcatctaggattgtacgtgaatcatatttattagctacttgaaatgcaatacgagagggaaagtttgctttaataagtccagttactacatctacactaggacgttgtgttgccacaataaggtgtattcctgcagctcgagcaagctgtgcaaggcgaacaattgagccttcaacttcttttcctgcagtcatcata

SEQ ID NO: 1878 - DNA, 200 bp, Lawsonia intracellularis
aggtctgcaagttcgtcaataataactacaaggtaagggaggtatgttaaatctgcaaattcttcaggtttgttattgccaatgctaagtaattttttattaaactcattaaaatgttttactccaaggcgtgcaagacagttgtagcgtctatccatttcataaacagcccattctaaggctactttagcaagtgcagg

SEQ ID NO: 1879 - DNA, 200 bp, Lawsonia intracellularis
ttctgtaacaacaggatgtataaggtgtggtaattgtgtatacatagctagttctaccctcttaggatcaataagtatgagtttcaagtcagtaggagtagcattatagagaaagcttaatagtattgtattaagacatacacttttccctgcgcctgttgttcctgccacaagaatgtgtggcattgttgccaagtctt

SEQ ID NO: 1880 - DNA, 200 bp, Lawsonia intracellularis
tgactgttgactttccttctatgtctttaccgagggccatacttaatggtgatgagctgtttttgaatgctttagactgtataagtgttttaaagcttaccagtgatctattttcatttggtatttcaataccaactgtatcactacctggaacaggtgcttgaatacgtacggcttcagccatcagacttcttgcaaga

SEQ ID NO: 1881 - DNA, 200 bp, Lawsonia intracellularis
tcatcactaaggtttgctattctacttacacggactccaggtgctgggcgtatttcaaaaagtgtaataactggacctggtgtaacacgaactaattctccttgaatattaaagtcactaagacaatccatcacttttttacttttttctttaagagtaagttgagatggtagtatatcattttctgtagaagaatgaag

SEQ ID NO: 1882 - DNA, 200 bp, Lawsonia intracellularis
aagggataaggaaggtaatggtagtttgtgttttacaagattagttgtttgtcgcaaagctgttgaagttggtatactagatgtttctgagaatgactctagtagctttggtaaattattggaagaagtatgttggatttgttcctcatacttgttagtcgtaggagaggttatcaatggatgtgtggtgatatctattg

SEQ ID NO: 1883 - DNA, 200 bp, Lawsonia intracellularis
tgtctaaattttctaatttatctatatcgatatgagtatcttcaaaggtatcatcttcgagtgttagaggagttatgtcaggagaagtgaattcgttataggtcgtagagattatgcttttcttatgggacttttttaatgtttcttgtaaagaatgtggtatgttccatagttgattgtttgatgtatgagaatattgt

SEQ ID NO: 1884 - DNA, 200 bp, Lawsonia intracellularis
attctttcagatcgatagcttgatagcgtagcaatacctgtatactgatgggcaagggtattatgtaataaagaagaatcataagggtaagcaggttgcagagtagggttatgaatttcatataatgggataatatcaatatattcttcttgttttttaaagggaaaatagttttgtataaaacaaagccaattatagtt

SEQ ID NO: 1885 - DNA, 200 bp, Lawsonia intracellularis
taaacatattgaacatatagtttttaaagaaatgtcatatttttcaattttatttttaataatattttgaaggcgatgaagaatatttaaccatgcaataccaaaggcaaattcaagagaaataaagaataaaaaaagccaaataagagtggaaccaatagtaccaaaaattatagaagattgtttataaatggtcatac

SEQ ID NO: 1886 - DNA, 200 bp, Lawsonia intracellularis
ctatgatgccaccacctctaacatcaccaataccaaagttccatgcagcaccaaaggaaatgaggcaaaatgaaagaataaaaaatccaagccaacgccaccaaggaatagttagccaagtagtaatacatccagcgccccatgctataaatatggctggccaaacaatagcagagaatccaaatatatctaccaatagc

SEQ ID NO: 1887 - DNA, 200 bp, Lawsonia intracellularis
ccactgatatatgcaccaaatattcctgcttgattatgagcttttgaaaaattacttactacatggttaagactaggatctcgttgatcatgagaaagtaggcttaaaaggacaagcaatccccagaaaatgaggaaaagtccaaataactcacgagcaagtttttgattattatcttcaggaggtgtttcattatttgg

SEQ ID NO: 1888 - DNA, 200 bp, Lawsonia intracellularis
tctactctgttgaagagatagatttcgggtagatttattttctttgcctgaatatatcatagtgagattctatagtaatagagggatatcatgatcatatttttatggtattcatagattagtagtaaaaatagtcttactcacgaccaatatattctttagtacgggtgtcaacttttatacgctcacctatattaata

SEQ ID NO: 1889 - DNA, 200 bp, Lawsonia intracellularis
aatataggtacttgtataacaactcctgtttcaagctttgcaggttttgttacattacttacagtatcaccttttatagctgtttctgtttctataacttcaagaattaacgttaaagggatatctatatctataggtttttcattgtaaagaagtacacggcattgttgtccatctttaagaaattcagattttccatt

SEQ ID NO: 1890 - DNA, 200 bp, Lawsonia intracellularis
agtaacatcttctgacatatggagttgttcatagtttgtaagatccataaagatgagttcagagccttcatgataaagaaactgcatatcccttgactctaagtttggccgttcgactttttctccagaacgaaatgtattatctattactcggccattaaggatattgcggagtttggtgcggaccatagctccacctt

SEQ ID NO: 1891 - DNA, 200 bp, Lawsonia intracellularis
tcccaggtttaaaatgctgaaagtctattatatcataggggacaccatcaatttctattttaagtcctttacgaaaatcagtagttgaatacatgctgcctccatagcagtttttaacatagcacgtaactaatgttgattattttagcattaaacgacaatgagatattgaaattttgtttgttttttggttattagtt

SEQ ID NO: 1892 - DNA, 200 bp, Lawsonia intracellularis
attagagtaaaactaagtacagctcatatatatatatataactattttttatcagtatagactcatttacaataacacagtatctgtactgtcagacgtcgttttttatagtcaataatgataactaccactaagtatatgaaagggatatttttgagcattcagcaaagcttgtcaatatctcatatgaagtaaggcaa

SEQ ID NO: 1893 - DNA, 200 bp, Lawsonia intracellularis
atgatgacacaatacaaacttcaacttgaggcaacaaattttactaaacaacagcttcaacaacaattagatattctagagcaaaacaatatacttcagattgcgttagcaggacgatcaaatgtaggcaaatcatctcttatcaatgctcttgcaggtcgtaaacaactagcaaagacaagtggaactccaggaaagac

SEQ ID NO: 1894 - DNA, 200 bp, Lawsonia intracellularis
acgttccattaatttttatgcggtttatccaaatacttttatgttggtagatttacctggatatggttatgcacaatgtagtaaaatagagagacaacattgggctatgcttatagagtattatctaaaaaactgtagtaagctaaaagcttttgttttgcttatagattgtagaatccctcctcaaaaactagactatg

SEQ ID NO: 1895 - DNA, 200 bp, Lawsonia intracellularis
aactagctgaatttgctaccagttattgtattcctcttattcctgttcttacaaaaattgataaatgtaaattggttgaacaaaataaacgtcaaaaagagtggagagcattgcttaataatacacaaccattacttgtttcttcaaaaaatatgaaaggggtacaacagctatgggaacgtatacaatatactattgat

SEQ ID NO: 1896 - DNA, 200 bp, Lawsonia intracellularis
agctattaagcatgagggagaatgaactgtcatagccaattttgttgttagttttagactaaatgccaagatttatggcataggtatatgttatcagcttatttatatataatatatgaataaataaacttaatataacctatagtaactatataatttttataaaagaatttttttataatattagtaataattcttag

SEQ ID NO: 1897 - DNA, 200 bp, Lawsonia intracellularis
aagttttctggcctaatttatgcataaatttttgctagttagcctttattatcttactactcctttatattactacctctattataaatatcctcattttattatccagtctgattttttcttattatgatatcacaataacaatattagtaaggtagagaaattatgaacgaattcattcagagaaatggtttttatgg

SEQ ID NO: 1898 - DNA, 200 bp, Lawsonia intracellularis
aaattcaatactggaaaattattcgttacaaacagaaactcaagctgatacacatagtaatattgctagttgtgcattattttggaagaaattcaaaacaacatgtcaatctacatataatattgtttccttctttttatatgagacatttattccctccatatatcaaagtaataaatacattgcatgctactgtgcta

SEQ ID NO: 1899 - DNA, 200 bp, Lawsonia intracellularis
ttcaatcaagctcaatacctatgcttcaaaaagataagcagtgtcgtttttgattaaaaaataggtatatattgctaatagataagtataactaataggaaagaatagaatatgtaatgaatttaacctagtgtgttaatgacaaaattataacaaagtttttttcaatacattgacagtaaaagattcattatctgatg

SEQ ID NO: 1900 - DNA, 200 bp, Lawsonia intracellularis
aatgaatattcattatgataggttaagttatttatattcttataacttaacctattatttttttctaaataggagatctgaaatatattttatgaaggaagaagaaataggagagttagtcataattattgatattttttcattatatatagatagttatcatatttactaatctatatatttaatgtttatagtattaa

SEQ ID NO: 1901 - DNA, 200 bp, Lawsonia intracellularis
aaaatacaactggtatgttttgtgcttttatttattaaagatagaaaattttattagttcctctaaagctttttttagttaagccgtaaagctaggtaactgtataagtaatggcaagtaacctagtgaagttaagcatcccacggcttattgtatatttggaggaagttaagatgaaatttttttatcagttagataaa

SEQ ID NO: 1902 - DNA, 200 bp, Lawsonia intracellularis
gttacattaaatgattttcaggtaattgagcctactaatgatacaagaatatttaaggatagcgaatataaagataaatatgaacaatgtacaaaaatgactatagtgatggataatgttactctaaaagttgtgactcttggtgtttctgaattgatattagaaaacatacagtagtttgaatcataatgtattaagaa

SEQ ID NO: 1903 - DNA, 200 bp, Lawsonia intracellularis
caatctgtagtgtgtactttggtaatatactaggtaacaatattgttcagatttggagagcattatatatgtttagcttaatatatatatatatgtctactaagttagacatagttgtgtctacactcttcatgttctgagtctaaggaggatgaaatgaggattgaatcagatggtagctggagacaagtaccaccaaa

SEQ ID NO: 1904 - DNA, 200 bp, Lawsonia intracellularis
taattcatcaacaagcagtgtagaatctagtcaaggagcacaacaaacaaaccaaacagaagaaacttctggtcgtagatcttcaagttctttttggggtaggttatgttctcgttgttctagtggtctttcacgtgttggagctgcaataagtagtatgttttctagtcttgttagttctattaggagcttaagtcaat

SEQ ID NO: 1905 - DNA, 200 bp, Lawsonia intracellularis
atataacaagagataaaacagcttcaggtgtttcttctggaagtttagctcctagagttagtagccatggaattggtggtcaagatggatccacaaggcatactactagtaacccacgggacagtgctcctccagatttttctccacctccacctcctattaataaaagacatggtgggccagattcagatccaatttat

SEQ ID NO: 1906 - DNA, 200 bp, Lawsonia intracellularis
gatgtgcctcatggagtggggagtacatcaccttctttacttccacatggtaaaccagatacagatccaatttatgatactccaagaaattttgggatagtaggtgcacctatacctatgccacaatcaggagggaatcgttctcaagaaccaatatacgatacacctaaaaagcctggagaatcgagtagtagttcttc

SEQ ID NO: 1907 - DNA, 200 bp, Lawsonia intracellularis
atcatcgtcctcatagttttattattaaatgttaggctgttataagagtatataactagcttattatataacagattagtcatagttagaggaggaaatagtaaaagaatttttaataagaggataagttatgaaaatatataatgagccaacatggtatgatggaataaaaaaagagaatgagcttatagagaaagaaa

SEQ ID NO: 1908 - DNA, 200 bp, Lawsonia intracellularis
agcctctggaagatataagtagttattgggagttttgtaatattgagttggggatagttgcacgtgttattgttggaatttttacactaggcttgtcagaagctgtatttaagtgcatgaggatgtataaagctaaaaaaagtgaaatatatggtccaccaatagtaaaaggtgtttcatggtatgaaaatggtaagaag

SEQ ID NO: 1909 - DNA, 200 bp, Lawsonia intracellularis
aaaagagtgtgggatgataatcagtcacactcagaagaagctcaaagtcaacctcagaggaataggagtaggagaaatagacaattaggtagtagagcaccaaataggtatgggttgatgtatcgtaatggtatgcctacaagattttgggtttaatgaggggaacactgttgaaacttagataactaaatatttttgtt

SEQ ID NO: 1910 - DNA, 200 bp, Lawsonia intracellularis
aatatattctctactttttttatttattagctagatagtaaaaagaacaaaaaatgaagacttgtccacatataggggaggtttgtgatgagagtagatgcaggtcaaagaataaatcaagctttaatggcggatacaacacaagcaacttctactaatgagacttcagaagcgcagaatacagagaaaacagaaggcag

SEQ ID NO: 1911 - DNA, 200 bp, Lawsonia intracellularis
taaaggttcttcaaaactatgtggtatgaattgtaaaaaaggtctgaagttagctggacgtattgcccttgcagttctaacattaggtatttctgaaggtgtgagaaaagggatagaagcttatcaagctagacaagttaaatctgaaggggcacgaatgggtaaattatgggaaactggtaagcctagttttcctgaaa

SEQ ID NO: 1912 - DNA, 200 bp, Lawsonia intracellularis
aaagtggcatacataatccatctgcaactgatgataatgataaaaatttgtggacatcttctagtcagaagaacagtggtggtgtaaatagttttggtaaagagtctccatcacctagttctggatctagtggttctcattttgtgtttcatgactcaccacagaaaccttcaagcggtattacagctgagacgaccctt

SEQ ID NO: 1913 - DNA, 200 bp, Lawsonia intracellularis
aaaacaaatagtggtggtgctacaggagaatagttgaagcattttttaaagaaataattattttataagtagggtacgtgaaaataataatatatactgcaaggtaatgtggggtaagctatgccaattacaataacgctcaacgcacctagacctcaagactttgaagataacacatctgtaaatagagataataggac

SEQ ID NO: 1914 - DNA, 200 bp, Lawsonia intracellularis
agaaaatactcgacaaacacaagagacgtcatctaaaagcgctacatcatcatctgcatcttcattcctacatggtctttgtagtaactgtaggcaacttggaggagcaatggcacgtgtaggaagctcagtacttgcaagtgctactctcacagtgaggaatttaggtgtaagagcagtaaatagttatgctgcaacac

SEQ ID NO: 1915 - DNA, 200 bp, Lawsonia intracellularis
aagttaggagtgggatatcaagattagctgatttaatttcattaagagacagccaatctggtccaagaggtcctgaaattactgttagttataataaagatcaagataaagttacgtttcatgatccatacaatagaggtggtttttcttcatcaggtagtagtggtgttagtggatagaacttactctgttatataata

SEQ ID NO: 1916 - DNA, 200 bp, Lawsonia intracellularis
tttgtttacctatttatatatctaataaataaaataagtttgtttagtatcttttataaatgaattaataaggtatatttttataccttttttatatattaggatagtaaaacataacctaaaaatttcattgttatcttagaagtcattatggtttatattcattgagtcattatgataagagaggagtaagagcatgc

SEQ ID NO: 1917 - DNA, 200 bp, Lawsonia intracellularis
cgccaatagatccagctatagcagctaagatatcagcagctatgaatcaagggctttatgattacgctaatagaaacagtaatgacagtagtagtgcaagtagtacatcatcagcaagctctacttcatcattaagctcgtcctctccattatatactgctaattgtaaacaaggtttaaaaatggcagcacgtgttgga

SEQ ID NO: 1918 - DNA, 200 bp, Lawsonia intracellularis
cttgcagttataagcttagggttttctgaattaattatgaaaggtatttctctgtataaatcaagacaagctacacagaatccacaaccaagagtagtaaatgtatttgagtcacaaccacctttagaaatttcacgtagatcaagtacagatagtactagtagttctggaagtgtatcttctcgtacacagttgatttt

SEQ ID NO: 1919 - DNA, 200 bp, Lawsonia intracellularis
tgaacaatcttctcatatgcctacaagcggtattacagctgagatgtcacttactcgtggtagtaatgattaaaaaggataagttggttatgtgatatgtaaaaaataagtaggctgaagatggtaatgacaaaaataagattatacatagcaaaagtggatagctaaccataagctatactaatctgacattctatcta

SEQ ID NO: 1920 - DNA, 200 bp, Lawsonia intracellularis
ggaagtatacgaaaatggagaaaaataacatactatcagaacaaaaacttattgtaactatccatccaaaatctgtatttcatatttgtggaagagctattctaactattttaacttttggtatttcagaatatctattaagtgctattagttcttcaaaagtagttcaatctgatttaaattagtaagaatgtaccata

SEQ ID NO: 1921 - DNA, 200 bp, Lawsonia intracellularis
atatatatatatattccctatgttagtaatgagtagctttgattagacaatatacaaataacaaagtgaaacactttacatatataaagtttttcctaagtaattcttattcttttttgggtaagaaaaacgtaatattatattattataactgacttattatggatgtatttaggatagatatataaaaatgatacttg

SEQ ID NO: 1922 - DNA, 200 bp, Lawsonia intracellularis
ggagtatcatttttatatatctatctattttttgtatattatttatacattaaataaataactactctagcttgaaagagtaacttaagctcattattatataattaaaaggttataaaaggttctgtcaattttttagtgatacataattattatagaaatggtaaagaaaaaatgaaggggcataaatatattgctta

SEQ ID NO: 1923 - DNA, 200 bp, Lawsonia intracellularis
tataaaatatgttttacatacttttagtatggcatgaattctgcttatattttctgttattctaaatttattcttaaagcttcaaggaatataactatgaattcttttattgctaaaaaaagtagtactctgattatattaagttacctattgcagtaataatatttgattattggaagataaaatttctatatattata

SEQ ID NO: 1924 - DNA, 200 bp, Lawsonia intracellularis
aactaaattaggtgaatatttactaatagttatatagaaagttattataggatgttttagtaaattatatcatgaagtaagagctcagaaaatacaagttttatacccaatgagtcataattatatgaatgaggagcttttctataattattatgggctcatagagcatctcctttattttatactataattactgaatt

SEQ ID NO: 1925 - DNA, 200 bp, Lawsonia intracellularis
gtaactagtagggaggtacacggggatgctcattattttactagtattaattaataaatagtatataattcatctggtagtaacataattctactaattactaagtaacaacaggatatttaactgaattattttgcaaagtataactcaacaaatttatattctaattatatgaaagaaataaaaaaatttttgtattt

SEQ ID NO: 1926 - DNA, 200 bp, Lawsonia intracellularis
ttgtattattttatataaatataaattttataggggtgtttttatataaaatattctgtgttagttgacttgttaattataagtcttcactataacacttggtaactaatgaacataactttattgctaagggagtttttaatcccattttattatgatattgttatcaagagtatgaactaatgttccttttatatatt

SEQ ID NO: 1927 - DNA, 200 bp, Lawsonia intracellularis
gtaatgtaagatcaggtcttcttttttgaaggaggatagcaactttttgtaactttttgctattattacctattaatataataggctttgttgtttcaagagtatcaatactttttttaaggaatttgagaggaatattaattgctccagtgagatgtcctacattaaactcctgtgatgagcgtacatctataagtgtt

SEQ ID NO: 1928 - DNA, 200 bp, Lawsonia intracellularis
actgcactcactttagttaaaagaatctctaactcatcattatctgtaatagctaaatgatcatgtatattggctaatgttttagattgcaagataagccaaattagaactataagtaatgcaggaattaatatagtgatataactcatagttatctccataattattatagagcttattatttctttttaataatacaa

SEQ ID NO: 1929 - DNA, 200 bp, Lawsonia intracellularis
tatacatagagtggtaatagtctattagcacaatatataaatatatttattaatattatcctattgttttttattagattttttatgttaaagaggtagattagcaagatttactactatagtatagcaatactcaatataataatataacagttaacttaagtaatttgattattgaattaaggacaatatatgcagtc

SEQ ID NO: 1930 - DNA, 200 bp, Lawsonia intracellularis
tataataaaatttattcatatttctgatacacatatttctgctcaaggctgtttagtatacgataataatcctagagtaaagttacagacatgtattgatgagattaaaagagatcatttagatgcagcatttcttatactaactggcgatgtaacaaatgatggtagcatggagtgtttttcttttcttcaagaggtgt

SEQ ID NO: 1931 - DNA, 200 bp, Lawsonia intracellularis
tatcagaactaccaatgccatggtatcttgttatgggtaatcatgatttaaaacaatcgttatttacagctatccctgaatatccaagagatccaaatggttttgttcaatttacagtagatactcctgtaggtttatgtatcattcttgatacaacaatagcaaatcagtctagtggaatactttgtgctgcccgctta

SEQ ID NO: 1932 - DNA, 200 bp, Lawsonia intracellularis
gactggttagctaatgaacttaagcaagcaacaaaacctgtgttattattttttcatcatccaccattttctcttggaattccctcaatggatgctattgtacactctttaaaaaattctgaagaattttttgctgtattgaaaccatataaagataagattcgccatatgtttgttggccatattcatcggcctatttg

SEQ ID NO: 1933 - DNA, 200 bp, Lawsonia intracellularis
tggttcatggaatggtataccattttcttgtgcaccaagtacagcacaccaaattgctttaaattttcaatctgataaatctgttcttggatttaaagaaccatcaggatatagtattgttttggtaaataatgatcagttaatagttcatttccaagagtgtaataagaccccgaatataattattaaagcataactat

SEQ ID NO: 1934 - DNA, 200 bp, Lawsonia intracellularis
tagaggaaataaattgtctgccatttgtttgaataatgtttgtaaatactgggatacatccaaagcagttgatgatataaattttaaagtagaatctgggaatttacttgtactcttgggaccgtctggttgtggtaaaacaactacattgaggctaatagctggtcttgaaaaagtaacatcaggccaaataatcattg

SEQ ID NO: 1935 - DNA, 200 bp, Lawsonia intracellularis
atgattgtgatgtaacatatttgccaccctcaaaacgtcatttatctatggtatttcaatcttatgctcttttccctcatttaacagtacaagaaaatattctttttggtcttaaagtaagaaaggttccgaaacaagaacaaaaaaaacgtcttgataatgctgtagcaatgttgaatttatatggtttacttggtcgt

SEQ ID NO: 1936 - DNA, 200 bp, Lawsonia intracellularis
aaaccttctatgctttcaggtggtcaacaacaacgtgtagctcttggtagagctcttgttgcaaatgcatctgtatgtctcatggatgaaccactttcgaatcttgatgcacaattacgtaatgatatgcgtaaagaaattagggaaattcaacaagctttaaaaatgacaatggtttatgttacacatgatcaggtaga

SEQ ID NO: 1937 - DNA, 200 bp, Lawsonia intracellularis
ggctatgagtatagctgatcaggttattcttatgaataaaggagtaattgtgcaacatgctgtacctgaagatatgtatataaagcctcaaaccatatttgctgcaagttttattggtactcccccaatgaatataataaatttatctcaaaaggatggaaagctaatcatatctggttctcaagatatttttattccgc

SEQ ID NO: 1938 - DNA, 200 bp, Lawsonia intracellularis
aagtcccagaaggagctactgttataggtgttagaccagaacatcttcaaatttcttctgttggatggcctagtatcgtattatctaatgaataccatggagctgtttcattagtaacttgtaaagttggaagtgaaaaaattatttttattcagcatggtaatgtaacttgttctcctggagagatagtttatcttagt

SEQ ID NO: 1939 - DNA, 200 bp, Lawsonia intracellularis
tgttcaccagagcatatgcatttttttaatggagatacaggaaataggatcactagacactaatagataaaaaacatagaaagaaatatattagatagttatattagagtagttatagaaactttatatatctatagttatcctcatatttgtgtattatatagaaagcacaaagagttattatagggaagaataatggt

SEQ ID NO: 1940 - DNA, 200 bp, Lawsonia intracellularis
tcgacaatttatacataaaatatattatataggttttgtccttagtttcattatagttgttccaacatttgctatagcattggataaggtgcatctaacattttgttttcctgttgctgtaagtggtcctatcacaaaaattattgaagatatgactgctgagtttatgagaacttatcctgatatagttattaagccaa

SEQ ID NO: 1941 - DNA, 200 bp, Lawsonia intracellularis
tatatacaggaacatataaagatactattacaaaagttttaacagcaatgcatggaggtgaacctccccatgttgcagtgttacttgcttgtgatatttattcattaattgatgaaaatgctattattgcatatgaagatcttcctggaggagcagagttaagtcatgactatttcccagtgtttatgaaaaatagtcaa

SEQ ID NO: 1942 - DNA, 200 bp, Lawsonia intracellularis
gctcaaggaaaaacgtggggtataccttttcagcgctctactattgttatgttttggaataaagaggcttttactaaagcaggacttaatccaacagctccccctcaaacatggcaagagcttattgatataagtaagaagcttgttaatagagatagttcaggaaaagttacacagtggggtatttctattcctactac

SEQ ID NO: 1943 - DNA, 200 bp, Lawsonia intracellularis
agggtatgcttactggatgtttcaggcattatgtattcaaaatggacttgaacttgcaaattcagaagggacaaaagtatattttaacgaccctagagctgttgaagcacttcaatttttagttgatttatcatataaatatggtgtgatggaaaaaggaactattgaatggtctacaatacctagagattttcttgaag

SEQ ID NO: 1944 - DNA, 200 bp, Lawsonia intracellularis
ggaaaacagctatgatgtggactacaacaggaaacttaacaaatattcaagaaaatacaacttttgattatggcgtatctatgttaccaaaacatataagattgggttcaccaacaggtggaggcaatttttatatattaaagaaaacaacagaagctgaacgtgatgcagccttaaagtttgtaaaatggatgactgat

SEQ ID NO: 1945 - DNA, 200 bp, Lawsonia intracellularis
aaagagcgtgcggcacagtggagtattgatacaggctatgtattagtacgtcctgatgcttgtcagacagagaatatgaaaagatatattaaagaattcccctaccttgatgtagcccttgaacaattaaaatatggagttgctgagttatcaactcatgcaaaccagcgtgtaactaaagtattagaggatgctataca

SEQ ID NO: 1946 - DNA, 200 bp, Lawsonia intracellularis
gtctgctgtaactggaactaaaactccatctctagcactagaagaagcacaaaaagatgcagaacgtatcttattacgttacagtaattgataaaaaatagtttgttactatgttatcctatttttttacttataactccataacataatgttatgatactactacgtcattatattatttctcaagtaaatgcatggct

SEQ ID NO: 1947 - DNA, 200 bp, Lawsonia intracellularis
tttattattaccagcattcattattatatttgtattttccttacttccgataacctctactattattaatagtttttttatgaatggagatgggggagctgtttcaaagtttgttggtatagacaactatctatatttactagaagataaagtatttcgaaaagctttatggaataattttatttttgttatgagtgtca

SEQ ID NO: 1948 - DNA, 200 bp, Lawsonia intracellularis
tcccatgttcaatgattcttgcgttaattatggctttatgggttaatactaaactagctggtcgtagtttattgcgtttagcatattttgtaccaactattttacctatgattgctgtagctaacatttggttattttttttcacaccacaatatggacttattgagcaaattcgatctttctttggtctttctgggata

SEQ ID NO: 1949 - DNA, 200 bp, Lawsonia intracellularis
aactggttaggtagtgagagtacagcacttttttgtgttattgttgttggaatatggaaggatgctggattttttatgattttttatttagctgcattacaacatatacctccttctttaggcgaagctgctatactagaaggtgcttctcgattttattaccttcgtaggatagttgtgcctctattgatgcctactac

SEQ ID NO: 1950 - DNA, 200 bp, Lawsonia intracellularis
attatttattttaataaatgcaactattaatgcatttcgtatgatcgatcatctttttatattgacaaaaggtggtcctaataatgccagtatgttgttattatattatatctatgaagtaagttttcaattttgggatacaggttatggatcagtgctaacagtaactttacttataatccttggctttatagcattat

SEQ ID NO: 1951 - DNA, 200 bp, Lawsonia intracellularis
tccaatttggtattttagaacgaaaggttcattatcaatgaaaaataaatataatccatatgaacctcaggggataacatattttttagaattggcaggggcttggttacttgctgttatttgggcattacctttagtatatgctatttggactgcatttcatccaatggcatattctacaaacttttcactatctgctc

SEQ ID NO: 1952 - DNA, 200 bp, Lawsonia intracellularis
caattacattagaaaattttaaactagcatggcaagctgctccatttgcacaatattttgtaaatacattattgctagtgacattggttattacttctcaacttattttttgtactcttgctgcttttgcattagttcgttttgaatttagaggtaaagagatatttttttggattattcttatacaattgatgattatg

SEQ ID NO: 1953 - DNA, 200 bp, Lawsonia intracellularis
cctgatgttcttattgttgaaaactataagacaataagttctatgggactgttggatacgactttagctattgcatttccttatttagcaacaggttttggaatttttttgttgcgtcaagcatttaaaattgttccaaaagaacttgatgatgcagcagctattgaaggtgcaaatatattccaaatcttatggtatgt

SEQ ID NO: 1954 - DNA, 200 bp, Lawsonia intracellularis
ttatgttccattagcaaagcctacgtatattgcttatgcattagtctcaatgagttatcagtggaataatttcctttggccattgattgttacaaattctgtttcttctaggacattaactgtaggtcttcaaattttttcatctatagagcaaggtgttaattggtctattattgcagctgcagttcttataacaacta

SEQ ID NO: 1955 - DNA, 200 bp, Lawsonia intracellularis
tacctcttttattagctttattactttttcagaagcagtttatgcagtcttttatgagagctggaataaaataaattctatagttagaatattgtgaattactagtaataactatatgctatctatactatatattatttatattatttagtaatagtaattttagaagaaaattattgatgattataaatcatgataat

SEQ ID NO: 1956 - DNA, 200 bp, Lawsonia intracellularis
tttcttctgctgtatcttcattactatctgttgagtcgggaagactatctataggaacacgatttgttgtggctggggttgatgaatgctgtagctgcataaaaagagtcatttcatttggacttgtaggagttgtataatatgataatataatagcaagaagtgttgtacataatacaacaactataaggctaccagta

SEQ ID NO: 1957 - DNA, 200 bp, Lawsonia intracellularis
ggagatcttttattagtaaatttccatagtatgaaaaatgacaatatagaaatagttgaagttataacaattcctagtttatcaaaaaagaaagactcaataattttagggaggtctgtttcaaatcctcgtggaagccaagtttgaattataggataaagtgatataaatagaaataataaaccaattaccaaaaaata

SEQ ID NO: 1958 - DNA, 200 bp, Lawsonia intracellularis
actacttatacctaaatataagaatagacttttttgttctgtaagtgagattatacattgagctgttaagatagcgattaaagaataaagacttataatagagagtagatcagatgaacttataaatataatgcatagtactgtaataagggtattaatccatatccaactatgaccagggaaggataatctatatgcta

SEQ ID NO: 1959 - DNA, 200 bp, Lawsonia intracellularis
tcagtttacgaggaatactaaaaaagtgtgaccagggtaaaagaaaaataataagtgtccatggtaaccatataaggcatatcattgcagtagaaaacaaaaagtctttagtttgaatatgaaaaattgtttgagttgggttaataatttgataagttgtaataaatttaagtagttctcttccattctccactgaactt

SEQ ID NO: 1960 - DNA, 200 bp, Lawsonia intracellularis
ataatacttccccatcctaataacataacaagcataagtccaaatgctaatgctccgtcataacaaccagctcgtcgaagatttccactccaaataagaaaaataaggcttgaaatgagtggtataaaaaaacctactaaaccacctgttaatcctgcacaacctgttagtaagaatcctatagtaagccaaaatggagc

SEQ ID NO: 1961 - DNA, 200 bp, Lawsonia intracellularis
actggatttcatccatcctttataaagacatataattgctaacaggacaatagcagcaaaaagtattgagtcaggagtgatatatggcatcagtagcgttatcattgttgataaaagaagaagtccagcaataaatggtacattttttttttgcttagtaataatagctagtagccatgtaaaaataagaacaatagcag

SEQ ID NO: 1962 - DNA, 200 bp, Lawsonia intracellularis
acagtgacatgtttgttatcattaaaaaggaagttaaattgattggtgagattgcagtgaggtatagccagggagttaaaggaatcatagaatcagaataagtagctataccaaactttagaatgatttggtcataatattgaagaagataaggtacgtactttataaggagtaagatattttgaagagcaaataggata

SEQ ID NO: 1963 - DNA, 200 bp, Lawsonia intracellularis
agtaagcttacaatgttaaggctagaaagaattgtaaagcactttgatgcaaaggaacgaactacagatgtatttatagcatattgagtattcatagtatattccaatatcattttaatgagaatacatctaggctagataaactattcctatcttattatgtatattatgtcaaaatagcatttttataatagtaggtt

SEQ ID NO: 1964 - DNA, 200 bp, Lawsonia intracellularis
ataataatcttatttaaagacttatctgcagattatctatcgaactagtatattgtataattttttatcattatagtatgtataatatataaataatactaattatttatatattatacatactataaaatcattttatagtattatattttgaatatagaatctatcgtatcttataaaaatttataaaaggagaaaag

SEQ ID NO: 1965 - DNA, 200 bp, Lawsonia intracellularis
taagatgcgtgtagttgtattaggtggttcaggatttattggtagttcacttataaaaacattagaaggaagagatcatagtattatagtttcaacacgtgattcatcagatatttctattagtccatcttcaaatgtatcttatgttgtgtggaatggtattgatagagaaccttgtttcaaaatgtttgatggtgcag

SEQ ID NO: 1966 - DNA, 200 bp, Lawsonia intracellularis
atgtaataataaaccttataggtgagaacgttgcatcaaagcgatggtcagagaattggaaagaaaaaattgtaactagtcggattcaagtaggcaaaacaattgtaagtgtactagaagagttaaaaagttttccatctgtttttatacaagcttcagctataggatactatggatactggaaaaattttgatactgct

SEQ ID NO: 1967 - DNA, 200 bp, Lawsonia intracellularis
cctcaatgtacagaaagctctcttccaggaaatggttttcttgctcaaacagtaatacaatgggaggcatctacttcagctcttgatacattgggtattcgtagatgtattattcgtacagcacctgttcttggtatgaatggtggtatattaaaaaagatgttacctggtttttattttgggctaggaagtatttttgg

SEQ ID NO: 1968 - DNA, 200 bp, Lawsonia intracellularis
atcaggtagtcaacctttcccttggattcatataaatgacgaaatagcagcaattatgtttttaatagataataaagaggcatgtggagtttttaatttagtagcaccagaacagttaaatatgaaacattttgcacagtgccttggaaaggttttaaaacgacctgtatttattcatattcctgaattattattacgtt

SEQ ID NO: 1969 - DNA, 200 bp, Lawsonia intracellularis
taacattaggagaaatggctgaagagctcctactttctggacaacgtgcataccctgaagccttattagaaaagggatttacttttaggcatggcctacttttacctgcgctaaaggacttattggataaccatttagcaatgtgataattagtaattgtatgacaaaagaatatatagtaaagatttttaatcaggaag

SEQ ID NO: 1970 - DNA, 200 bp, Lawsonia intracellularis
gggatctacccatcctgtatcaccgccagcaccaaaacctgtaataaaacgaacagatgagagttctcctgcatggtttatatgtgccatgattctaaatgcaagttcttcaccttctcgttttacctgcaagtcgttaataaatgggatagtagatccaaaccttagatcactaaatatatagacttttcctgtttgtg

SEQ ID NO: 1971 - DNA, 200 bp, Lawsonia intracellularis
tttcataactttcagttaaaacaggaaaaactacaaattgttcataagtacgaaatatactacttttttcttttaacatatcccaaagtacttctggaggctttttaaaagaagtaaatttagatgggggagaagtaaaactattataacctgagacattccagtgttcacctttatcaagaataagtttccagtgaaat

SEQ ID NO: 1972 - DNA, 200 bp, Lawsonia intracellularis
ggtgtaaatgcatcaggaataaggtggactgctataatatgttcttctgtgttatgtcttggtagtgttatttctttttgtgtttgaaatgtattttttgctagataactatgggtaagatatgtctcaagacctagtcttattactatattggtaagaggatagataattgtccatagtaataataacaccataatgaa

SEQ ID NO: 1973 - DNA, 200 bp, Lawsonia intracellularis
tctattgtttctcctaaaaaaaagtccaataattaaagggagtataagaagtaaatcaactatgaaaagagagtttagtcgaactctatattcgctaaatggaagaaaaatttgtgtgccataagagttcataacatcaagccaaatatgtaatattagaatagcataagtaaaaaaccatgcttcaataagtgtccatg

SEQ ID NO: 1974 - DNA, 200 bp, Lawsonia intracellularis
aaatttgtttaggtggaggaagttcattgggttggggacgtaatgcagtaagtacaactaatgggattgtacatataaaagcaaggccccaagcgccagctaaagagtgtgtgatccctcgatgaactttaatgtagtctattgcagagctaacaaaaagaatatctatatctggtagcatagcaacaagcatgccccat

SEQ ID NO: 1975 - DNA, 200 bp, Lawsonia intracellularis
acaagaaaccaccatggtcggctttctttaggaaatgtataaacgatggttgctccagttagtgcatgtgtcaatggatccatgtagtgccttattattaacgatcagaaaagatgattgttccttttccaagaaggtcgtgtatatggacaatcccaaggagtttatagttatcgtcaactataggaagaactgtaata

SEQ ID NO: 1976 - DNA, 200 bp, Lawsonia intracellularis
gctttttgttccataatatcaaggagtattgcaatagtatcttgtggtttaccacatttaggcctaggtgtcattatttgttcaacaggtgcatcttgcttcaacctattataacaaatagaacgtcttacatctccgtctgtaatgataccacatactgtattttttttatctattattaacacaactccaagaccacc

SEQ ID NO: 1977 - DNA, 200 bp, Lawsonia intracellularis
tttgtcaagagttttcaatgcgttacattgagatgtgcctagatggacagtaggtagtccatcagtgcgcatgacctctgtaacacttagtgtaagacgttgaccaagcattccgccagggtgataacgtaaaaaatctttttctgtaaatgattttagtgacataaggcaaacagcaatggcatctcccaatgcaagga

SEQ ID NO: 1978 - DNA, 200 bp, Lawsonia intracellularis
ctgcagtcgttgaggctgttggtgctaatccatgtggacaagcttctttaggtacttcagtatgtagtacaacattggcagcttttgccagggttgaatttaatacagaggtaagagcaatcattggagtaccaaatgatttaattgttggtacaatagcattaagttctggagtttctccagagttggaaatagataaa

SEQ ID NO: 1979 - DNA, 200 bp, Lawsonia intracellularis
atgagatcagaacttttaagacttccaatatctccatgtgcaccctcaactgggtgcataaaaaaagcaggagtccctgtggaggaaaaagtagcagcaatttttctgcctactaggcctgatttcccaacgcctgttacaataactcttcctttacaagatgaaagaagtaatagagcttcaacaaatgtattccctag

SEQ ID NO: 1980 - DNA, 200 bp, Lawsonia intracellularis
acgttcacgtattgtttcaattccatccatttcaatggttaatacttcgtgtgctagtttgagtaagtattctggagaagtttgagtagactctgtatatttttttgaatatgaatggatagcagtcatagttttcctaacagttttgtaaatgtatttgattaaatgaagaataggcaaaaatatttatgactgcaaga

SEQ ID NO: 1981 - DNA, 200 bp, Lawsonia intracellularis
aataaaatatataatctaaaggaaaatctattgtcttttaatgaataatgaagtttttgacttagtattataaacttaaagtagtttttactatgagttcatgggggaatagttgagattctatctatcctttaattttttatagaaaagaagagagtatcgataagtatcttttgaggtataataatataaatacatta

SEQ ID NO: 1982 - DNA, 200 bp, Lawsonia intracellularis
aataaaattttaatagccctatgctattattgtagatggaatatattattttggtataggtaacatatcgttataagttataatacttttattcaaaaatatagattatttcttactgtcattatatttactgttcctagcatagtaataaaatacttaaatcctgaactacatcctttaattgtattatggagtagtgc

SEQ ID NO: 1983 - DNA, 200 bp, Lawsonia intracellularis
gttagctattttttcctctgttattatccctatgtgggcatgtgaagtggctcagatagatatcccacaaccattggctattattgtaattactcttattgctgtgttaccagagtatgctgtagatatgtattttcatggatggctggtcaagaacctttatctatgtatcataattatcctattgcaaataggacagg

SEQ ID NO: 1984 - DNA, 200 bp, Lawsonia intracellularis
ggctaatagattacttataggtgtaggttagccaagattattatattattttttatcaactatagccagccaatactaatagatgcagcaaaacgtatagaaatattttttattactagctacaagctatgcttttatcataccatgggaaaatacttttagttgatatgatagtattatttttattggaatttatattt

SEQ ID NO: 1985 - DNA, 200 bp, Lawsonia intracellularis
ggtatataaaaacagttctaaaaaaagagaaggagagtcacaaatctattgaaattaaaggctctgcaaaagctttggtaatgttacctgtaagatattgtcgaattgtcacagtaagtttatttcttttttctgcatctatgcttcttatgaatacagagctttttagtgaacatgtattatattatgtggaaggttat

SEQ ID NO: 1986 - DNA, 200 bp, Lawsonia intracellularis
ttcaaattgatgagtttttacttgtttagtggattacaccattagcttctgaggctccagaatttattattgctattttactagtgttaaatggaaagcctagtttatcgttaggtagtttattgactgcaaagttaaatcaatggacattacttgttggtatgatacccttagtttatactgtttcttcagggcatata

SEQ ID NO: 1987 - DNA, 200 bp, Lawsonia intracellularis
attcctcctatgattataacacatcaacaaagttatgaaatattgttagcatcacaatcgttatttgctatttgtcttttattaaatctttatatagggataccaaagctatagtactgtttgttctatttgtatttcagtttagtgtacctttttattcagacttccttgaagaaattttggagtttatcataatactg

SEQ ID NO: 1988 - DNA, 200 bp, Lawsonia intracellularis
aaagatttcatatctacttttctattttgtatattgtattagcaatatttcttattatgaaacgttataataatcttttcttattaaagactattttgactactactactactactactacatcttcttagaagatttttatataatgctgtctctgttgataagaaataaaaagcacaagaatcttcttgtgctttttg

SEQ ID NO: 1989 - DNA, 200 bp, Lawsonia intracellularis
ggggccgggcacccggtatcaaccgttaccgttgctttctttcgaacctggcggggttggcggatctaccgccgcccggcttccttaatttaactttttaagcttatgttaaagatagagttacgtcaagtttttgtactttattatctatgattctttttattttgggagggatattacaatggaatttttaattttaa

SEQ ID NO: 1990 - DNA, 200 bp, Lawsonia intracellularis
gagttatagaattatgaaaatttacttgacataaataatggactcaagataagagcacctaacaggaatatatgtcaaattggggagaggtggccgagctggctgaaggcgctcgcctgctaagcgagtatacggataaaactgtatcgagggttcaaatccctccctctccgccatttttatttttcattagttatcat

SEQ ID NO: 1991 - DNA, 200 bp, Lawsonia intracellularis
tctattattataaaataagtatgttaaaaatataaaaagttttttaatacttattaatgagtagttgtgttctattagaagttaaattcaagagttttatggcctactttaatagtataattagaagagataacatacgatttcacttgttcaaaatctccatgtggatgatcattaaaaaatagatgcatttttgttcc

SEQ ID NO: 1992 - DNA, 200 bp, Lawsonia intracellularis
aggatgagcaaagttttttttaatatcatttaaaaaatataaccaattattacgattccaacgctgatttccttctaactcatgaaagcaaatagcaaatgcaactataagatggaaagactgatccattttggggattgaaatattaggttgaatactacaatatgttctaggaatattaaatgctggtattagataat

SEQ ID NO: 1993 - DNA, 200 bp, Lawsonia intracellularis
caaagattgcaacacctggaatatctaatgcataaacatcatgtccatattgtttgcatagccaacagaaaaaacctgctccagatccaatatcaaggatacgtacaggggatgatttatgtagtcctaaacgataaatacgtcgaagattaataataaagtagcgtttaaagtctgaatattttgcatatgtttgtccg

SEQ ID NO: 1994 - DNA, 200 bp, Lawsonia intracellularis
tgaaaaagatcttgaactttttgttggagagctagtatttctggtttagatataaagtaattagctctataccttgctttatatttccataataattcttttgggttttttatataagttttatagtttcctaaccgatcatatattcgttttcttctatgtgctgtatttgtgaaatattttttgatatcactttgaaa

SEQ ID NO: 1995 - DNA, 200 bp, Lawsonia intracellularis
taacatttttcctcttgtaatgtgccaaatgtattattgtttaatatgctacgtagttgcaatataaaaaatatttagtcaaaaaagataattaaatttttatgaaagaatattaaaaggaattatgtttttttatttaataatgtgatactaaccataattttgtatttggctgtttaatttctaaaaatataaataaa

SEQ ID NO: 1996 - DNA, 200 bp, Lawsonia intracellularis
aatctctattataactgtttgtcagtataaggaataactattaatttgtaatagtgagagaataaaaaagttaatattgtaattaaactatcctactctgttagtgtaaaataatttaaaaatattttattatttctgtatcactaggagacagctaatttatttatagaaataattttttgtgttatattaatcagatt

SEQ ID NO: 1997 - DNA, 200 bp, Lawsonia intracellularis
tattattctcctctaatagattcaccttcttcttgccggcttttacagttaatacaaagtttagtaacaggtctagctttaagtcgtggagttccaatgtcatcaccacaatcttcacaaacaccgtatgtaccatcatctatacgttgtagtgcagattgaattttgcgaattaatcgtctttcacgatcacggatacg

SEQ ID NO: 1998 - DNA, 200 bp, Lawsonia intracellularis
taatgtgaatgctctatcagattctgcagatgccctatcagcaggatctgcaaaaatttcattaccatctgtgaggtcctctagtgtagaatctcccttatgctgggcttcttcaagcatagttgtgagtaatgcacgaaagtactcaatatccttttgttccaaagtatatacctcctggcaggataatttgacttttt

SEQ ID NO: 1999 - DNA, 200 bp, Lawsonia intracellularis
tcatagtgcggttccaacatataagaaaaaaaaatcatagagtaaagacccgaaaaacctttgaaattagtattttattcataacaagataggcacatacactttaatttaacccaaataacgctataatagaatcaaagaaataataaaaatttttaatataaaatatattaaaatttttgaaatagataatacattgt

SEQ ID NO: 2000 - DNA, 200 bp, Lawsonia intracellularis
tctagtaaataaatattaaatgtataaccaattatagttagttataatcacataattatgtgaggagtatttgacataaccttcaaaagtttcaatggaataatataatgttaagtgtgatagagctattagatagtaaaaaatgatggaaaaagtttatagtaagaaatcaagggttctttttggtaactataaaaaaa

SEQ ID NO: 2001 - DNA, 200 bp, Lawsonia intracellularis
atttttaagaattttatacttatcataactaattacgcatatattagttatgataaagaaaaattaaataatatcacctataaatattataaaaaatgtttatgactaactatagtaagttatttaattaagtagattattatttttaatttttataactgtaacttgatattaatcataaattaaatgaaaacatcctt

SEQ ID NO: 2002 - DNA, 200 bp, Lawsonia intracellularis
caatagttataacctattagtatatactactgttctaattttaatagaaattagaaaaatatactttttatagttaaaaatatccatgagttacttttttagctgatattgtaagatgagtgaatggaattttagctactaatttttttagtgtgatagaatgttcatctatactcatatcaggtaaatgagcttcccaa

SEQ ID NO: 2003 - DNA, 200 bp, Lawsonia intracellularis
ggaaaaaccagtacccatatccctgtagttaatgttatccgacttaaaccatcagtatttgttgttggtttgtagaaaccaatgtctttatctatattaaacaagccttctagttcaaggttgttaataggcctattccaaaaatattcttttcctttaagaactatatgaagatcacacattgttctatgagattcata

SEQ ID NO: 2004 - DNA, 200 bp, Lawsonia intracellularis
gaggcaagatccctccatccttgatgtcataggaaaaatattaatgttacaaccagcaacagtatatatcccatctggtagggaagagtttactttttggttgatccataacataagctcattccagattggtccaagttcatagttttgccagtttttaatactatcactaagcatagttattcctgtatatatttttc

SEQ ID NO: 2005 - DNA, 200 bp, Lawsonia intracellularis
tagtgtatcttctaaagtttgagcaaaagtctcaagatagtgttcgtcaatagtgagtgctggtagtagtcgtagtatattattttgtgtaagattaaggagaaaccctttttgaaggagtttttcccatagtggtttacctggacaaggtaaaactatacctatcataagtcccataccacgaacttcttgtatttttg

SEQ ID NO: 2006 - DNA, 200 bp, Lawsonia intracellularis
ttggatggcgattagcaatattttttagacgttgaataaatatattacctagtttttcagctctcttgtgcaggttatctcgctgcataatttctattgttttagtagcaaccgcggaaataagtggacctcctccaaatgttgtaccatgacttcctactacaaaggcttgagcaatttcgtctgttgttaatattgcg

SEQ ID NO: 2007 - DNA, 200 bp, Lawsonia intracellularis
ctaatgggtaatccattagcaagagctttagcacatgaaaggatatcaggtttaattggaaagtgttgaaatgcccaatattgaccagttctacatagtcctgtttgaatttcatctacaataagaagaagatcatgtttacggcaaagtttttcaatacctatgatatagtcgctatccataggccttaccccaccttc

SEQ ID NO: 2008 - DNA, 200 bp, Lawsonia intracellularis
gccttgaataatttctataagtactgctgcagtggagggtgtgatagcttcttcaagtgcaaccagatcattccaagggacttgtttaaagccattaggcattggagcaaaaccttctttgagacttggttggcctgtagctgcaactgttgtaagtgtacggccatgaaaagagccttctaagctaataatttcaaatg

SEQ ID NO: 2009 - DNA, 200 bp, Lawsonia intracellularis
cattacattttttgatatgttgcatgtacctacgagttagcttgaagcttgtttcatttgcttcagctccagagttagaaaaaaatacttttgtaaaatgccccatagataaaagtcgttctgcaagttctagttgttcgtcatgataaagaagattacttgtgtgaatgagttttcttgcttgtttttctatgacttct

SEQ ID NO: 2010 - DNA, 200 bp, Lawsonia intracellularis
gcaatctcttcattacagtgtccaaggctagttacagcaagtccagacagaagatcaataaacttatttccgtttgcatccaatatgatagaaccatgggcttctactacatgtatggggtatcgtccatatgtatgacataataattttttttcatgtagcataatagattcattgtaggagagttgcatgaatacctt

SEQ ID NO: 2011 - DNA, 200 bp, Lawsonia intracellularis
tccttttgagctattagttttttcctgtatgtccaaaaccaaaacttcctctagacgtattatcaagttgttgtgtttcaactaagctgacttggaaagctggttggaatacaagttgggctattctatcaccacggttaacatgaacaggatttttagctgtatttaaaaggacaactattatttcgcctcgatagtca

SEQ ID NO: 2012 - DNA, 200 bp, Lawsonia intracellularis
ggatcaataacaccaacaccttgggcaacagtaagcccatgtattgcaccaagaccactacgagaataaacaaatccagcaatatttttttcaagaggctcaatagcaataccacatggtattgtttctctttctcctggtaaaatagttagtgatgtttcttcaatgcatgcacgtaaatcaagtccaacagaggctgg

SEQ ID NO: 2013 - DNA, 200 bp, Lawsonia intracellularis
tgtttcgtatgcaattccactagttgtatatattttttttgcgtctcttaagtacataaagcgaatagacacttcagaatgcaaaaaagctgacataacaattcctttcattaactatcaaataattaattagtgtaactctatatacaacagactaaatagcataaacttaatgaaaatcattaacgatagtgcaggga

SEQ ID NO: 2014 - DNA, 200 bp, Lawsonia intracellularis
tataagtttgttgtatggcaagtatattaaatcttgagtccagaatgtttctactatatcttcctttttctgtgtagacaagctttaaaagctgattgtgctgtaaagaattaacggaatattaatgagcatggggtatttaaatgacagaaataacacatagtggcgatcaaactactcatttaaaaattcttggtaaa

SEQ ID NO: 2015 - DNA, 200 bp, Lawsonia intracellularis
ggctctataggacatcagggacctccttcgtcatctctcttagaaacatttggtaatttatatccacatcgaccttatgttattactatagcatttccagaatacacatctttatgtcctgtcacagggcaaccagattttggaactattgttgttgagtatattcctcatgagcgttgcattgaatctaagagtttcaa

SEQ ID NO: 2016 - DNA, 200 bp, Lawsonia intracellularis
actgtatttaattgcttttcgtaaccatcagacgtttatggaaacagtcacaaatacaattcttgaagacatggttactgttctagatccattatggtgtagagtgaagggtttatttgaacctagaggtgcaacacatttgcatgtgtttgcagaacatataaaagaggttgaagaaaaagagaaacaggaagccttac

SEQ ID NO: 2017 - DNA, 200 bp, Lawsonia intracellularis
atacagttatttttaattggaaacagcagtacttaccacatagttggaaataagtttttttggggtatagtaatggagaactatggtcttttcattgatgtagggaacacatcagtaaaaattggtattggtgttattgataggcttctgatttcatatacactttcaacaaacaattcattaagcggagatacattagg

SEQ ID NO: 2018 - DNA, 200 bp, Lawsonia intracellularis
catacaactccttcaatgtattaatcatgcagagcaagttatcaataaagatattactatttctagttgtatgatgagttctgttgttccaactatggatacgttgttacagtatgcttgtgaacgttttttgttatgtaaaccacatattattaatcaggattttattatcccactagataatcattatgaagagcagt

SEQ ID NO: 2019 - DNA, 200 bp, Lawsonia intracellularis
gtgaggtaggtgctgatcgattagttgctgcctatgctgcaagacgtttatttcctgattctaaatcagtagtatctgttgattatggaacagcgactacatttgactgtgtaacagataatacctatcttggcggcttaatatgcccaggtattaaatcttccttacaggcattatatactaatactgcaaagttacct

SEQ ID NO: 2020 - DNA, 200 bp, Lawsonia intracellularis
tctattatattaaatactgcatctaaggttcctataattggtaaaaatacaaagactagtctaacacatggttttctttttggctttgctacaatgacagaaggtatttattcaaaacttattaatgttcttgatggaccagtaacttttgttgctacaggtgggtttgctagagatatggcaaatgttgtttgttgttt

SEQ ID NO: 2021 - DNA, 200 bp, Lawsonia intracellularis
tgatgctgtttgccctgatcttattttagatggactacatttactatggatagattgcttaagtaaaagttattctttataattaaaattaaaaaattattgatgtattcgtattccttattgcagaaagaagattttttttgtacatagaatgctaattatgatatagtgacatgttgctattaggaggaatatatgac

SEQ ID NO: 2022 - DNA, 200 bp, Lawsonia intracellularis
tgctattgcatcaatttgggctagagaaatccttgattctcgtgggaatcctactgttgaagtagaggtgactcttgattctggatatattggacgtgcagctgttccatctggcgcatctactggaacccgtgaagcattagagttgagagatggagacaagcagcgatataatggaaaaggtgttttgaaagttgttg

SEQ ID NO: 2023 - DNA, 200 bp, Lawsonia intracellularis
aagctgtaaatggtcctatctcagaggctgttataggtattgatgcattaaggcaagttcaagtggataatactcttattgatcttgatggtactgataataaatccaaacttggagcaaatgctattcttggagtctctcttgctactgctagagcagctgcagaggctgttggtctaccactatatcagtatattgga

SEQ ID NO: 2024 - DNA, 200 bp, Lawsonia intracellularis
ggaactaatgctaaagtactgcctgttccattaatgaatgttattaatggtggagcacatgcaccaaataatttggatattcaagaatttatgattatgcctgtaggggcagaaacatttcgtgatgcattaagaatgggtgcagaaatttttcatacattaaaaactatattatccgctgatggacatgttactagtgt

SEQ ID NO: 2025 - DNA, 200 bp, Lawsonia intracellularis
aggagacgaaggcgggtttgcacctcaccttaaaagccatgatgaagcttttcaatatttagttaaagctattgaagaagcaggatataatcctggttcagaagttatgttggctattgatgttgctgcatcagagttttataaagataaacgttattttcttacagaatataagactcctttaaatagtgaggaaatga

SEQ ID NO: 2026 - DNA, 200 bp, Lawsonia intracellularis
tagagtggctaaaaggatttacatctaggtatcctttaatatctatcgaggatggtcttgctgagaatgactgggatggttggcgtgaattaacagttgaattggggaatgatatccaactagtaggtgatgatatatttgttactaatccaatcatgctgagtcagggagttgaagaaggtattggtaattctattctt

SEQ ID NO: 2027 - DNA, 200 bp, Lawsonia intracellularis
atcaaagtaaaccaaattggtacgttaacagaaacattagatactattgaacttgctaaacagtcagcatatacaactattgtttctcatcgctcaggagaaacagaggatagttttattgctgatcttgcagttggaataaatgctggtcagataaaaacaggttcattgtcccgtagtgatcgtcttgctaaatataa

SEQ ID NO: 2028 - DNA, 200 bp, Lawsonia intracellularis
tcagttactacggatagaagaagagcttgaagattctgctatttactatggtcctgtttttagtgaaagtaatcattcttgttgtgatcatacctaataatatatagatattacgttaataattgtcgaataaaaggtaaaatggcttgagcagctttttgtggtgtaacaagcttgaggcatttggtagagatattaca

SEQ ID NO: 2029 - DNA, 200 bp, Lawsonia intracellularis
tgtatttttattacatggctgacagtgaagatttgattggatatgtctatgattgtctgaaggatatgtccatgcagagcttgtagagccaagtatagtgaaagatggtgtatctacagcaacagcaatatgtcttggagcagagcaattaccaatatgtaatattgcttcattaatacaagcagacatttccctaagag

SEQ ID NO: 2030 - DNA, 200 bp, Lawsonia intracellularis
ttaacatgttatcaggaagtaaaatatagttattgagttctggtgtattaatcagttgttggatctctttatattctccaggtccccaaagaggaagaaagtataaattaagcttagcgtttacaagcatctttaataattcaatataatgtgtgataggccaacgacgggtattttttttatgtgttggatcaatggta

SEQ ID NO: 2031 - DNA, 200 bp, Lawsonia intracellularis
ataagatgactttttgactttaatcctaatgtggtaagtcgttgttttgctaaagttttttcttcttgagtaaggtaaatatgaggaggttcaccattccactcaatacctagtagtctaaggatacttgctttactcatggctgagtaaccatcaagtggtttaattgaatgcgtgtaaagcagttttgtgtaccatgg

SEQ ID NO: 2032 - DNA, 200 bp, Lawsonia intracellularis
tggagtataagaaattcgaataggtgctttagaaagagctactacccaacgacatcgtggtagttgttgaaaatctataacaagatcaaattttgtctgagtgactttccaataccattgcacttctttaaataaagaacatagtttttttttatccaaagaccaaacagtatctataaatggattgttttctaaaaggg

SEQ ID NO: 2033 - DNA, 200 bp, Lawsonia intracellularis
gaacacattttttttctgtaagtaaatggagttctgcattaggatatcgacgttttaaaagttcaatcgatggtgttgccagaataacgtctccaagttgtcgaagctgacatacaagaatttttttaggtgagatactagaaagggagttcataaaaattatttaattaactttgtgttaatattgttctatacatatg

SEQ ID NO: 2034 - DNA, 200 bp, Lawsonia intracellularis
atagaaaatagattatatttattattcaatactatttaactgtaacaatatataatttttcattattaatgctatagctaattttattctttaaggaaatcttatagcataagagataatataattgctgaaaatgtagcaacgcattaataagatcaagaattttttactgttactagttagcttttataaaagattat

SEQ ID NO: 2035 - DNA, 200 bp, Lawsonia intracellularis
cctgaaaatatacgatactcactttttttataactagcaacagttacatattgttattctatatctttattgtttttattattaactttgtaattttgaacttattattattattattataaaagctagataaagacgactaatttgataactaaatttaatgctattaactttgctatgactatgattgattcttcctc

SEQ ID NO: 2036 - DNA, 200 bp, Lawsonia intracellularis
aagtaatgttataataactcatattatgtatataattttagtatattttacttctttctattttatagggaagtaacatttttattatggctactaatttattctctatccaaaagaaatttacgttattcttagttcttgtaacacttattagttttatgtacatttcattcacaatcgcaaaagatagctctagttct

SEQ ID NO: 2037 - DNA, 200 bp, Lawsonia intracellularis
tcaaaagaaaaaaatgtgtctaataagttgtataaaaaggaacaactaactagattagatgagtgttatactggaggaggtaatggttattatcaatgggattttgatctagataatattcctaaatggcagctattggagcatggtttatggttaggaaagtttccaggcgtgactaaggccggagatgtttttgaagt

SEQ ID NO: 2038 - DNA, 200 bp, Lawsonia intracellularis
tgtaatgttaaagattaatcctcaatattacgacttttcacttcacatggcatcacagactggtaaagcattttctttacaggattggagtaatacatatgagcttagtgcagtaattaatgctagtatgtatcttcctgatggcgttacaagtacaggatacctccgtaatcatgatcatattaataatgcacatgttg

SEQ ID NO: 2039 - DNA, 200 bp, Lawsonia intracellularis
gaaagcgtcttggagctttttttgttgcatcaccttataattctactctccctaatgcagatcttcttgatcgcacaagcgataactgggagatacttctccctcaatataagatagttgtccaaaattatagagttatttctgctaatcgtcagtgtttgtggagtacaaaaaaagttattcactctatagcagcagtt

SEQ ID NO: 2040 - DNA, 200 bp, Lawsonia intracellularis
gcacgtgatgggaaaggttatttattttttattcatacaaagtatccaatatcagatttagattttggtaaccttttactctcattacctattgatatccgtatagttatgtatgttgaaggaggaagtcaagcaggactacttataaatacttctaactttaaacaattatggatgggaaaacatccagttagtatttt

SEQ ID NO: 2041 - DNA, 200 bp, Lawsonia intracellularis
gtctatcaataatacatcagtacctattcctaatgttataggcataaaaaagagaaaaggtccaataccatctttaaaatagtctaattgactcctatgggaaattgtacaagtaaactgtatgtaataatggttgggttgccagcaagaggaaaaagtacgttagcaaaacgtatatgctctggactggaacagcaggg

SEQ ID NO: 2042 - DNA, 200 bp, Lawsonia intracellularis
tattcaaacagctatttttaataatggagagttacgtcgtactctttttggaggagaaagtgcttgcccagaattttttaatcctcaaaataaaagaacaaaacgctttcgagatcaaatcctttatcaaagtatggctggagcaaggggttggttagaacaaggtggagatgttgctattattgatgctacaaatggta

SEQ ID NO: 2043 - DNA, 200 bp, Lawsonia intracellularis
catttgttcaacggatgaatatcatgatgacattacaagatagaccgttgctgtttgttgaatgtgtaaatgaagatcctttacttttatcagcatctattcaacgtaaaacaaaattacctgaatttacagaactttcagaagatgaagcattagagtcgttcaaaaaacgattagcttattatgaaagtgaatataca

SEQ ID NO: 2044 - DNA, 200 bp, Lawsonia intracellularis
ccattgagtaatgaaccttgttggatgagagttgatgctgttgataaccgtattttagcagaatctccatgtaatgacttaccatactatgcagctattagagacattgttgtttcaagatgggtccatgatttatttttagtaaggcatggtgaaacagaatataatttagaaggaagaattggtggtgatccaccttt

SEQ ID NO: 2045 - DNA, 200 bp, Lawsonia intracellularis
aacagaaaaaggacaagagcaagctaagcagttagctgatcattttatgtctattgatatcccttatatttttacttctacaaaaattaggtctattcaaacagcagaactattacttgctagccataataaaactgtttgtatggaattgactgagtttgatgaaatcgatgcaggtatttgtgaaggtatgcgttatt

SEQ ID NO: 2046 - DNA, 200 bp, Lawsonia intracellularis
tagatatacgtaaacatatgccacatgagtacgaagctagatcaactaataaatatagttatatatatcctcagggagaaagttatgccatgcttaaagaacgtgtggcacagggactgaggcgtgctttatttcttgcaggtgaaggaacattaatgattattggtcatcaggctattaatagaaccttattgtcttta

SEQ ID NO: 2047 - DNA, 200 bp, Lawsonia intracellularis
ttcttattccatcgaccagaagatgttccatatacatatatacctcaaaatcaatattaccatattactgtgacacaacagaaaaagctttttgaaatgattcaatatgcttaaaagcttttttataagagaaaagagttatttctttgaatctcgaaacatatgatatgtaaatttaagtattgaaatagcatcttgca

SEQ ID NO: 2048 - DNA, 200 bp, Lawsonia intracellularis
gttttggcatagattttagaaaagatggtgctttaaatctatctttaagattttcaggctcatttatattttttgtttgttgagtatttgtcttatgttgttttttgtcttgagtattagctgaatctaaaaaaaaggaaaattgttcttcattcttggaagaagaaataattttttttgctgaatgttccagtgataga

SEQ ID NO: 2049 - DNA, 200 bp, Lawsonia intracellularis
atacgttttttgacaggttgaaagaggtgttttccaagaagttctgccaatggtgcttcaccaatagattttaagtattcttggagggttgttgcaatttcttgaggattaggatttgctatacaaccacgagcaacttgttcgtagagtaactcattttgaaaaggtgtacgtccagcaatgagagcttgtgcagcatc

SEQ ID NO: 2050 - DNA, 200 bp, Lawsonia intracellularis
tgagatatttttttttgataagaattcgcatgcttcactatataaaggattagatgtaccttcatttacttggactaaccgttgattaatggtttttgcatgttcccattgatgattttttacataaatatgtaacagttcgtctaatatatctctatacttccttttacttcctttacctttccatgctgttgctaatg

SEQ ID NO: 2051 - DNA, 200 bp, Lawsonia intracellularis
ctagaagtgcatttgcatgttcaggttgatgttttactatatagtttaattgagtaatagcttcatcccaatttttttctcgtatggctttaattccagctgtataactgttttcagaagataactctttagtgctttgatgagttttgataaaatattcaagtgctgtttcaaaagcaattgtatttgaggtaactgta

SEQ ID NO: 2052 - DNA, 200 bp, Lawsonia intracellularis
tgttgaatagattgtgttttttccttagctaattgaatggacttaagtaaatcggaagatgaataaggacgctttaatatggaataatacatattttctgcatgttcttgagaaatgtttgttattgtcatgataagaggaatcttttttaatacaggatgtaattgcaataattcaacaaactcttttcctgttatgtc

SEQ ID NO: 2053 - DNA, 200 bp, Lawsonia intracellularis
ttttaattgttcgtggcataggataagatcaggcatactaagttgatttaggtagttactgacaagggttgatgctgcttttatacctagctccataaattgaatgctttttacattaatagatcgaagtgatcgacgatcaaccacagctacatcttcattacgagctaagagaaagacatgtatattgtcttcaagtt

SEQ ID NO: 2054 - DNA, 200 bp, Lawsonia intracellularis
gatttaataaatttttcatatagagaatatatctattctgaatgagtactgtctagtagaaatcttttataaaaagatagtaatatttttagttagtcacattctgtgggaatggaataatttttttacaattatttttttttatcaacgttggatcagtatttttctttacagaagccccacatgttgaacatagttct

SEQ ID NO: 2055 - DNA, 200 bp, Lawsonia intracellularis
ttatggttatcaatatagctaagtattcctcttaattcatagcaatgtttacaaaatggtccttttttgccatctgtatgatgaaaccaataggaatttctatcaaagtgaaggttcttagaaaagaataatgtatcttgaacgtcttggagatgaagacgtagtttattattttcatcatgaatttcaataaattcctg

SEQ ID NO: 2056 - DNA, 200 bp, Lawsonia intracellularis
ttgtaattctataagtaatttaagtgcttcttcatgtttgccattaatggcatattcataaacttgtttaaatttatagtaattaatcatacaagatgcactccttttttttttttagtcatactttgttatcgtgtaataaataaaaaactttagattaggggaatagatagtattagtaataagaaaaatacatattt

SEQ ID NO: 2057 - DNA, 200 bp, Lawsonia intracellularis
taggataatcattaattaaaaatagttactatataaatgaaaggagctttcaaggagagatagataacctacgatatattaaggctaaatcttagttgggaataaatggcggagaagtattgcctagttgagtaaatatgctaatgtagcatgtggtatatgtgatatatttagaagtgataataaattatatttacaca

SEQ ID NO: 2058 - DNA, 200 bp, Lawsonia intracellularis
ataactgtggtaagttttgtgatatttaatatttatagcatgttagttaagtaaaccataatggtactaaaaatcatagtattaaccaaataaataatacagatagacctatttttaaatatttatagaaattaaacatcatactactcatattatagttagattcaattattagtaaaaattatcatttattactatta

SEQ ID NO: 2059 - DNA, 200 bp, Lawsonia intracellularis
catttttctattcttgtaagaataattgttataagataaaaatgagatataaaataagtatatattaaaaaataatacattataatgaattagtatgattgttatagatttagtaatatctttgagtttaatatatatatatactttatttatatagactacaataggttaatatttcctattagagttaatgtatctta

SEQ ID NO: 2060 - DNA, 200 bp, Lawsonia intracellularis
atgtattgttatatactttattactctaatgtagaatgaatttttatcaaaatagttatataatatgttcttataatataagaatcttaacttattataattaataaaataagttaattaaataattatagtagttatagtactattgaaaccatcctttacgatagaaaaagtaaataagaatcccagagataaggacc

SEQ ID NO: 2061 - DNA, 200 bp, Lawsonia intracellularis
atcaagcctaataaaacaaaatatccatattcccatccaatacctggcatgttttcaaaattcattccataaatacttgttataagcgttaatggcatgtagacagtagaaagtacagtaagttgtcgaagtcgttgttctgtctttctttccattagatactggtaaaattgttgtatatccctcaggcgcatttcaag

SEQ ID NO: 2062 - DNA, 200 bp, Lawsonia intracellularis
gtgtgtcaaacttcttactagatgtccttgtgcttcaatgctgtcttttagtgtatcataaagttcattgagaaaagctttttttgtatgttgtgtttctaaatttgttaatgcataaaactgatcttcaaattgactgagaagttgactaacttgtcgacgtacattcacagcgtcttgttctttgataacaacagtag

SEQ ID NO: 2063 - DNA, 200 bp, Lawsonia intracellularis
ctaaatcaactttttccccaaattcttcagtagttagtcgagctctggtaaagcagcgaatatttgcatctataaggttgtctaaaatataagaaattaaagttggtatagattttacatcttcatccatagtatttttttgatactgtattctaagttgtacaagaagagatacttggctttgatggagagtaacaagt

SEQ ID NO: 2064 - DNA, 200 bp, Lawsonia intracellularis
cgatctgggaaaataagaaatgttacatactcacagtcaggtatagaccattcgctacgtataggaagtctaagtatagcacaggttgaaaaaactgtagcttctgggaacggttggttttcaatagcaatttcagaaatttcaggagatatagaaagattatcaagaaaagtaatgaggtcatttttactaccagctat

SEQ ID NO: 2065 - DNA, 200 bp, Lawsonia intracellularis
atcataccattgtattttttcataaataggaatttttttatggatactatgttttgagctatatcgaatttttttcatatatgtattttctagtatatattaaaagatagatagttaaacatatttttttttttaataaaaaaatggataaatagaatgtaaactacattgtaataatttataatttattatataatgta

SEQ ID NO: 2066 - DNA, 200 bp, Lawsonia intracellularis
tttagttcatatgatacattatatatcttttcaattgtatattaatatatttttataaatattttactattatattttgcatcagtatttttttttgtattgtttataatacgatttagtaatttatattaatttataacttattttactaaatgatattactaactgtgagggaacaatggctgatgctatagctcttg

SEQ ID NO: 2067 - DNA, 200 bp, Lawsonia intracellularis
gagatcatattgaatctaaatgtacacgttgtcatgatgtaacgggtcatattgtaattttaatgattgatgatgaaattactaaagttgagtgtagggcttgtggaagtatacataagtattaccctccagttaatcaaaagagtagtctaaaaaagataaaagaatctagtcctggatctaaaaaagtacaaaaagaa

SEQ ID NO: 2068 - DNA, 200 bp, Lawsonia intracellularis
acaacaacatctgttaatgttataccaaaagctagttctaaaaagacaaagtctcaaaaagtgaatagagaactaacagaacagcaatggcaagaagctataaatacaagttatggaatacgtaagccttataccatgactataaatttagctcttggagatattgtagatcatcctaagtttggagaaggtgttgtaca

SEQ ID NO: 2069 - DNA, 200 bp, Lawsonia intracellularis
ggaactattcccgcctgataaagctgaaatattatttcgtgaagggataaaacttctaaaatgttctaccaattagtagttagggcagaagaggacagaatataagtcctgttgtcatgggtaggttaaacataagatttgcatttgctatagcttgtcctgaagcacctctacagaggttatctatagctgatataatt

SEQ ID NO: 2070 - DNA, 200 bp, Lawsonia intracellularis
ataagtcgttgtgtacgtatatctactactaaccctatatcacaaaacatagtaccacatacatttcgtgtttcaggaagtttacttgaaggaactattcgtatccatggctgatctttccatgtattcgtataaagtctgtacacttcatcctgtgagattggtaatgctaattgagtataaatagtggaaagaattcc

SEQ ID NO: 2071 - DNA, 200 bp, Lawsonia intracellularis
tcgtgtagtaggtaaaaggtgaggactaaatgtgactgtaataggttgttttgcaatataggaaagctcttgttcaatttctggtgtatgtctatgtataccaatattataggctttaaatgaattttgtatttcacaaaaaagcaatgaagacgttgaggtattacgacctgctccagaagttccagattttgaatcaa

SEQ ID NO: 2072 - DNA, 200 bp, Lawsonia intracellularis
tgattatattttcaaatttgattaacccatgtttaatagcaggatacaaccctaaaataatggatgttgggtaacaaccaggatttgcaacaatattagctctttttatgaattcttcattaagttctggaataccataaacagcttcagaaagtaggtgagatgcattatgttcaaggtgataccattgactatatgtc

SEQ ID NO: 2073 - DNA, 200 bp, Lawsonia intracellularis
attggattattaagcctaaagtcagccgaaagatctataactttagtaccctgttctaataattgtggtgctatctccattcctgtgccatgcggtacagcaagaaaagctacatcacaagttttaccaatagctttatggtctaatggggaaaaaatagtttctgcataaggcattcctgaaagaaatggatgaacttc

SEQ ID NO: 2074 - DNA, 200 bp, Lawsonia intracellularis
atagagttttttaccacattgctctctagatataataaatataggttggatatttgggtgtaatgatagtaagcgaataagttctatacctgtatatccggttccacctataattgctgcttgaattttttgtattcccatacactaattttttttcataacatatttcatacgtagttcataaagtaggccttcaataa

SEQ ID NO: 2075 - DNA, 200 bp, Lawsonia intracellularis
gtctagattcatcactatctagacattcttttgttttttcttgtaacattgataaaatttcaattgtatgttttgccatgggtaaatcttggataatttccccagattcaggatgaggaacttctccaagttgtgctaaggctgatgatgctagtgataaaataaatgttgagaatgtaactttagggagtaaattactt

SEQ ID NO: 2076 - DNA, 200 bp, Lawsonia intracellularis
gtcgtagtaaaagaaggttgtgtattttttgtgccattaatgtttttagttgtagagtgtacttcgtcttctttagttgtaataggtttatacattattatctccaaaaaataaattttaaactataatacaattggcaataagttattattagctaacgtcaaggcccgtcttaatgtgctaatgaagttttatagcgt

SEQ ID NO: 2077 - DNA, 200 bp, Lawsonia intracellularis
agaagtatttatttgaaattatagtaataagttactttaaatgtaaagtaagaaatgttgttgtggaagataatataccatcatttagattaatttatctaggtagttatcatttactatcaaagttccataagaggagatatagttggttattcttttaagctagttataaccagttaatattatgcctattttttaaa

SEQ ID NO: 2078 - DNA, 200 bp, Lawsonia intracellularis
aaggaagagtaaacagataaatccaaagacctatattgatgacaatagctaaaaatatagctgcagaagccatatctttccctgctttaacaattggttttatgtcagttgtaataagatcaaagattttttctatagcactatttagtagttctattatcatgacaaaaagccatccacttatggtaataagacagtgc

SEQ ID NO: 2079 - DNA, 200 bp, Lawsonia intracellularis
agtgcatttttgtcttgaaaccacaagagaaaaaatagaattcctaagataattacttcatgacgaaaagattgttcagatttgaatgcttggattaaacccattagagaatattttgttgcatgtattagatgacaaaactttattaagcaaaatgacattataatcctacagtaatagctaaatgactaatgtgcact

SEQ ID NO: 2080 - DNA, 200 bp, Lawsonia intracellularis
tccccaatcatagcctatactccattgagttacaagtggtactataagaggtttaccacctggcgttacatttgacattaacatggctatacgtttacctacttcttttgcattgtcttctggtgcttctacgacaagttcgtcatgtacctgaagaataagctgagcatccattttagctaatgttgtatcaccatgaa

SEQ ID NO: 2081 - DNA, 200 bp, Lawsonia intracellularis
cagttaacattgcaatttttataatatctgcagcacttccttggataatagtattgatagcctggcggcgtgctaaagcttgtaattgaatattttctgagtgaatatctggtaatagtcttctacgtccagcaatagtagttacatatccatattctttagctgagtgttctacttgatcataaaatttttttatggct

SEQ ID NO: 2082 - DNA, 200 bp, Lawsonia intracellularis
tgaaggtgttcaaaatatcgttgtatgaatttttttgcttcatttaatgttgtattaagttcttgggcaagtttttgtggtcccatcccataaattaaaccaaaattgatagttttagcatttcttctttcatccgctgttacttcttcctgacttttttcataaagaaggcttgctgtacgtgtatgaatatctgcacc

SEQ ID NO: 2083 - DNA, 200 bp, Lawsonia intracellularis
ttcaaggaaagcagtaagaagtgtgggatcttttgaatagtgggctaagacacgtagttcaacttgggagtagtcagcagaaattaagaggttcccttgagaagctgtaaaacatgaacgcatacgttgtcctaatgagcctcgtataggaatattttgtaggttagggttactggaagaaagtcttcctgtagctgtag

SEQ ID NO: 2084 - DNA, 200 bp, Lawsonia intracellularis
caagttggttaaatgttgtatgtacacgtccatctttaccaataagtcgtggtaatggttctagataagtagagcgaagcttttcaagtttacgatattctaggattgtatctatgatagggtgttgtcctgatagcttttcaaggacttcttgagatgtggatgcttgccccccacgagtttttttagctgcaggaagc

SEQ ID NO: 2085 - DNA, 200 bp, Lawsonia intracellularis
tcaagttgattgaaaagaatatctccaagttgctgagctgagcggatattaaaggaaccaccagcctcatgataaattgtttcagtgagatgatctaaactattttgtacttccacaagaaatatttttaaattttgatcatctagaaccacacctactgcctccatatcagcaaggacaggaataaggggtagttccaa

SEQ ID NO: 2086 - DNA, 200 bp, Lawsonia intracellularis
tgagtccattagttctaatagttgagcagtcttaagtttattacgaagttgttcccatacttttagagcaatgagacctgggtttcctgcggataatccaaaaactgagccccaacgtgcaacaagtttaggccagctataatctctttcttcgggatcaagaaggtaagtagcaagacctaaatcaatccaatgtgtat

SEQ ID NO: 2087 - DNA, 200 bp, Lawsonia intracellularis
tagggatagttctccatattccatttgttctcagcaacgattttaaatcaggagtaactacgtgtcgcgattgattaagagctttagttagtggtagtaatggtcctgtatagaaatattctgtattttctacagctaatgttacttcatgtttatctgtcaatagtgctacaattttccctttaactgatggaagatca

SEQ ID NO: 2088 - DNA, 200 bp, Lawsonia intracellularis
ctggctgtagagcaatatattttattgattggtttagaagacccaaaaagagatagttgtccatgagaagatgttccagactctataataccctttgggtctatgagttttttttgatgtacaacagccataaattctcgctccaaagaaacaagttcaaactcacgaagaatagtcaatgtttcttgtacgttaattgg

SEQ ID NO: 2089 - DNA, 200 bp, Lawsonia intracellularis
gccaactttaattgtatcaatctgaagatctatacactcagtcgttgataatgttgtaagttgtctgtaaagaaacatggcgtcaaggtggccatcaaattttttttgaacaggtaagggtagtgaggagaaattatcttttatagattctaatgaaggaaagtcttgaaaaatttttttcgcggttttgagtcctatcc

SEQ ID NO: 2090 - DNA, 200 bp, Lawsonia intracellularis
ctggaattcctggaatattgtcgctagagtcacctattattgcttgaacatctggccattgagaaggtaataatccttcatcttctttaaagctttttagtgtagtaattttttcagctttacttgctggatcccacatcagaacatttttatctagacattgttttaaatctttatcagaagcaataagtacaataggg

SEQ ID NO: 2091 - DNA, 200 bp, Lawsonia intracellularis
tagttatcacgatagcggtgtgcaattgatgcaaggcaatcatcagcttcgctattactagcaacagttaaacatagtcctaaacttattactaagcgttttataggttcaatttgttttataagtgcttcaggagcagggctacgttgagctttataaagagggaaaagtgtatgtctaaaatttgttccagggccatc

SEQ ID NO: 2092 - DNA, 200 bp, Lawsonia intracellularis
taagacaaatacaaaatattttggttgttcttcacgtaatatttttaagaaaattctaccaatattaaaaagtgcacttgtaggaaatccatcagagcgttgcatgctttgatttgcataaaatcccctataaataaaagctgagccatccatcaagtaaatggggtcttctgaaaagaattctttaatattcatgagtg

SEQ ID NO: 2093 - DNA, 200 bp, Lawsonia intracellularis
accatatgtttttagtattacttgttatagctatcttatttcttaacaataagataacaacattgaggcataattctatgcaataagaacattattaaaaatttactacaataatgagataggtagatagtatatcaccaggcaaatatgtatctgttccttgtgagcaaatcaaggagagttattcaataatataagaa

SEQ ID NO: 2094 - DNA, 200 bp, Lawsonia intracellularis
aaaatttaaattataaaaatacaaaaagactggtagataaacacttcacagtaataaatagtttgtgtattttctaatgactttagtttatagtactttttatagtaaaaagttttttgtttagtttggatttatccatagagatctaaaattgtctgggaggagatatgggcaatcctataggtagtaggaataatggt

SEQ ID NO: 2095 - DNA, 200 bp, Lawsonia intracellularis
cttaataaaaaaaataaagatgaacattttgaagatgagtcttcaggtaatgcaaagttatggcttgcccttattttcattattatttcagcaggtgtgatacttttattttggtttgttagaggttctgtttttcaaaaagatgaagtaactacagaagatacacagaatatgatagtaaataacccttcagaagcata

SEQ ID NO: 2096 - DNA, 200 bp, Lawsonia intracellularis
tgaagctatgaaggaaaagcttatgaaagatatagaatcttctcagtctaaagaaaaagaacctatgcttgaagaagtaattgaggaatctatatctccaccaccacctgcgtcaacttttaataattatgagcaaggaagtaaacacatatttagagataaggatgaaacaggagcttctgaacgtgggattttttcca

SEQ ID NO: 2097 - DNA, 200 bp, Lawsonia intracellularis
caaaatctacacatcctgttcatacaaaaagagacaaaaaagatgatacagttgttcgaattggctttattgatagtttagctgcatggatggcaaaaaattatatacctccttcaaagtctacgatgtctggctccattaatgtaacgcttcagagtcttaatatgcgttatggtgtaggtatgacaggcctttcatgg

SEQ ID NO: 2098 - DNA, 200 bp, Lawsonia intracellularis
aaaggtgaagatccacaggcagctcggtctgcaattttacgatatgtctttacaccatctatgttagacgcattatatcgtctatatgttgatagatttatgaaagcactttctgaagagctttctgtacgtcgtcataataaggtacttactattcaacagaaacaagaattttatcgtttatatgctacacagtttcg

SEQ ID NO: 2099 - DNA, 200 bp, Lawsonia intracellularis
tggtattgcaagtacattgcagggtattgctactatacctaattttgtccaaaaggtggatgacataaaattggctgccaaacgtgtagtcgatactaatacaaagtatataaaccttgtaagttgtacagacaaatgtaaagaattaggaaataaagtggagttacagcagctcacaaagaaagttactgctgcaagta

SEQ ID NO: 2100 - DNA, 200 bp, Lawsonia intracellularis
aagcatatcaacaagcaattattacacgtgagaaaatgattaaagcacttattttatcaattaaacaacatactactacacgtgttttggatgactccaacatactattccttgcaaactgggtatatcgtcgggtaaagagtgatccagggaatatagatgctgtattacaatcatcaacattgtttttagatcttgca

SEQ ID NO: 2101 - DNA, 200 bp, Lawsonia intracellularis
aaacgttttgagatgacctctggaataataagacatgagtagtctgttattatgaagagttggtttgtaatttttttaggtataattcttcttctttattatccttttataggagtaggaaaacagacacccagaaattcattacttaaaatacagtatgcaattgattcacataactttgagctttttgaagaatatgt

SEQ ID NO: 2102 - DNA, 200 bp, Lawsonia intracellularis
tgatataaatggattattaaatcaaggagttgaatattttttttgttcactaactactgttaaagatacatcaaagttaccatcacttttatatttattggctaataccatacaagtacctcaatatgcagcacaggtcagatctttatttattagtgaattatatttatttattaaatatggaatttcttctgggttgt

SEQ ID NO: 2103 - DNA, 200 bp, Lawsonia intracellularis
ttgcagggcatgaactattagatgaacctactggccttttaacaccttatatttcaaaaatttctttaggtagaaaagagttattattttctaattcagaaaaagtattagcaaaaatgtataaacagaaaagagatattgtagttcctatccaaattaaagattatggtaatggacgacagtatcctgttttactaggt

SEQ ID NO: 2104 - DNA, 200 bp, Lawsonia intracellularis
atgagcttttgtaatggtatgtggaaagttactactattaaaaatcttcctgaactatgtaaaaagtttgaagaggaatatttgcataattagtatataggataaagaaaaaagaatattatgggttgttatagctcttagtaacttaacagtacttaatataacatgccaaatttatttatctttttctatctaaaaaa

SEQ ID NO: 2105 - DNA, 200 bp, Lawsonia intracellularis
taaaaaatcattaatataagttaggatagtgttagcatgaatagcagtataagattgatatgttatatagtttgttgtttttttattctttcaaaattgagtatggctgctgttaattattctgatctagaaatacttgttcaacatagaattgtttttcaggaaggctcagatattgctttatttggtgataaacaaat

SEQ ID NO: 2106 - DNA, 200 bp, Lawsonia intracellularis
tcttttcacacaggatgctcagatattatgtgatgataatgctatattagattttgagtgtctattggcatcatatccaggggttataactggaattatcactgatgaagaaaaaagactttggttaattgtgaatggacataaagtactttatgatgatggtaaaaaacgtatttatagtgaggcattattaaacagta

SEQ ID NO: 2107 - DNA, 200 bp, Lawsonia intracellularis
cagttaaagattctatggctcaactgtatcctttagagcctagtcgtcctatccctgatgttggcattgcaccaggacgagttcgttcttatgcattattagaggcaatatatggtaatagtagagaagaagtagagaagcaattagtagggattaggtttaaaaaaagagaaaaaatatgttttttttctcattctgca

SEQ ID NO: 2108 - DNA, 200 bp, Lawsonia intracellularis
aaggctgctcaaagcttaaaagatgtttttacacaacttgatacattattagataaagatcctcaggtttatgaatatatttttcctttatcaggtggattcgcatggcgtgttattgcaggagaaaagaggttaagtccacatagttacggtatagcaatcgatttacatccaaaaaaaggtatatattggcgtttagt

SEQ ID NO: 2109 - DNA, 200 bp, Lawsonia intracellularis
aaaagatagagaaaaatatttacagatacaaaaagaatatccaagtgagttagtaggcatttttgaacaaagaggttttatttggggcgggaaatggtatgaatatgactttatgcattttgagtatcgacctgagttaatttataaagcaaagagaagtattcataataacgttatgtaactatagtaataaaaatata

SEQ ID NO: 2110 - DNA, 200 bp, Lawsonia intracellularis
tttacttatcttgtttatacttaagataaaaaataaaatttgtataatgctgttataaataaataaactactaattattggtattagctaaactagtatgaaaaaatatactgtattttttaaagacatttagttctatttttatatagaaattaaagtttaagatctaactctccaagtttttcaataagtttcatatt

SEQ ID NO: 2111 - DNA, 200 bp, Lawsonia intracellularis
ttcactatagtctacaggacaagagataacagagactgttgagtcattaagtgctttctgtagtattggtaatagatcttctgctttagttattctatagcctttagcaccaaatgcttctgcatatgttacaaagtctgggttagtgaaatcaacaaattggtgtttacctatttccatatccattttccattttatga

SEQ ID NO: 2112 - DNA, 200 bp, Lawsonia intracellularis
gaccatatgatttatcttcccagataaggataacaaaaggaattttttctcgaatagctgtttctatttcttgggagttcatcataaacccaccatcacctgttaccacaagaactttacagtcaggacaagctagttttgcagctaatgctcctggtaaagagaaagccatcgttgataatccatttgaaataatgcaa

SEQ ID NO: 2113 - DNA, 200 bp, Lawsonia intracellularis
gtaagaggaagataggttgggtatagtcgagccatccacattttgacagctcctgtatctacaagaacaatgtcatcatctttcattgcttttctaatatcgctgattactctttgtggtttaagaggatagtcatctgctgattctccatattcaagctcttctttatgcagctggataatattagctatacctttcca

SEQ ID NO: 2114 - DNA, 200 bp, Lawsonia intracellularis
aggggtatgactgtttttaggaagctgttcacataacatatttagtgtagcactaatatctgcttggatagctacagtgataggatatgcaatgtcttcatcttctgcaatttgatgaatgtgaatgatgtttttattattatttggattaatcttagatggagtaaattcttgaagttcatatccaatgctaataatga

SEQ ID NO: 2115 - DNA, 200 bp, Lawsonia intracellularis
gatctgctttatcaaaagcaaagttttcgtagtcatgtttcataaatccaattacaccaagcagtaatggatttctatctgacagtatgccttttgccataaatgttgtagctacaggaatttgtaattgttccgcaaaacgttgaagagcttcactagctttgtttctaacagctccatggcctacaagaataacaggg

SEQ ID NO: 2116 - DNA, 200 bp, Lawsonia intracellularis
ttttttgcatttacaatgagttctttagcttgttctaacatctttggatctggatatgaagtatgctgaggacgtgtaagtaacggtttcaaagaagtatcaatatgcatttcttctacatcttctggcaaggcaataaaaacagcacctggtctttcagtttgagcaagttcaaaggcttttcgtatcatctcaggtac

SEQ ID NO: 2117 - DNA, 200 bp, Lawsonia intracellularis
agagtttggagttaatatgatatctgcccattttgtaattggtttaaacatggatacaagatcaacgtattgatgagattctttataaatacggttgagcccaacttgggctgagatagcaacaagaggtgtactatctgtttgagcatctgcaacaccaagtaagagattgatagctcctggaccaagtgttgatatac

SEQ ID NO: 2118 - DNA, 200 bp, Lawsonia intracellularis
agacgcctgcttttcctgtaaggcgtccataaatatcagccataaatgatgctccttgttcatggcggacaagaataaacttaatagatgaattagcacatgccaaaactagatgtaaattttcttcaccaggtaatccaaaaatatatttaacaccttctgcttctaaacactcaataatgagttgagaaacagttttg

SEQ ID NO: 2119 - DNA, 200 bp, Lawsonia intracellularis
atattatttgtatccataaaaattctccttatattttacttgagtagccagataaatagccccattgtgataatggataaggtagtactgataaagagtatagaagccatttcacgttctgctgtatggtattgaacagcaaggatgactgttatggaagcagttggtattgccatggataatactgattccatagtttg

SEQ ID NO: 2120 - DNA, 200 bp, Lawsonia intracellularis
ttcatgagggagttgaagtaacattgctaataaccagactataaaaggtataattatattacgactaataactgaaataacaacagggaaatttagtgtgacacgttgagcaaataaaacaatgcctgatgcaaatagagcaactccacctgttgctttaccaagtaatgttaaagaatcattaatagatgtgggaaatt

SEQ ID NO: 2121 - DNA, 200 bp, Lawsonia intracellularis
gaatattaaatacaataaaaacaagagcaagtaatggagcccatacaacaggttgacgtaatgcattaagaatatgtttatagaaattattcttattactttcagataatgtagatatagagagtaatactaaactgacaggaacttggaaaaggttcataataatacttgaaatagctatggcaacagcactttcaata

SEQ ID NO: 2122 - DNA, 200 bp, Lawsonia intracellularis
ccaaaaagatatcctaatacagggacccctacaaagggaacagcaggtccacttatggctagtgcttgcagtgctgcacttcctaagtcttgtttaaagacaattcgagatattagaaaaacacctaaaaaacctccaatcattgcaatgcatatgagaaagaataatccccaatcagaaactaattgttccttagggat

SEQ ID NO: 2123 - DNA, 200 bp, Lawsonia intracellularis
aagaaccatactagaaaataatgttagaggtagtgcatataacataaccatttggtttagtattgttgcttgctctatattaaagtctttatgccatccagcaagtacacctaaaagaagtgtgattacaataggtaataaagctccaattatagtatctaacattggttacgttccttatacataagaagtaaagcaaa

SEQ ID NO: 2124 - DNA, 200 bp, Lawsonia intracellularis
caatagtaaaaatattacagttaaattaaagatcaacaagatagtaatcaatgataataaacaagtagttgtggatgatacatgcattatttaactttattgcagtatatctaattttattactatgcgttaattagtaatagtagataaaaatgaatattatatctaatatatatatatattagatataaaggaggctc

SEQ ID NO: 2125 - DNA, 200 bp, Lawsonia intracellularis
tcattctttgagtagttatcttaatcttaatgattataattttatataatttttaagaggtaattattaaagtaatcctacttttttcattaactgttgcatagtagatttatctttatctgaaagagtggaaggtaatggacttctacagggtccaccataataacctaggcagtctaatgcatatttaagtcctgtaa

SEQ ID NO: 2126 - DNA, 200 bp, Lawsonia intracellularis
taccaaatccggaagtaatagctgcattgagttcaagaatatccatttgtaatttttttgctttattatgttcaccttcatgaaatgcttttataatagctttacagtagtcaggagcaatatttgcataagccattgttccaccacatccacccatatataatgtaggtaataaaaaacttgctgaaccagcaattact

SEQ ID NO: 2127 - DNA, 200 bp, Lawsonia intracellularis
gaaaaacctggtgcactatcatgaataattgtagaaagttggataatatctccgctactatcctttattcctatgatattatcatggcgtgatgcagatatacttacccatgcaggtatatttaaagcagtattccttgggatattatagagtaatacaggagaagtagattgatcagcaactctaaggaagtaatctaa

SEQ ID NO: 2128 - DNA, 200 bp, Lawsonia intracellularis
cataacttcagggttactaacagtatttctataatatgtgggatttatgacaactacaccatcgacttcagctaatgaagcttctttacataatgttaatgtagagtattctgattcacatcctactccagcaagaacaattttttcaagaggaaagtgctctctagctaaagagataagctttattttttctaattcag

SEQ ID NO: 2129 - DNA, 200 bp, Lawsonia intracellularis
ataatgatactgcttctccatttgagccaagtactaaaataccatctagcgttgtttttccaaattgtttaatattttctataaatttatcccatgcaatttctccactagcataaaaaggagttggaacaggtgcaaatacaccgtataacgtacactcttccataatatcttcctttattgtgttatttagtagtatt

SEQ ID NO: 2130 - DNA, 200 bp, Lawsonia intracellularis
atataactgtatattataataattatatcataataaaagtaattatacttcaatagtatattatttataataagttattatatttaatattccatttttatataactaaaattattacatttacgttattatataagtagtatattataggaagagatattaagtagtattcagtatgtataggtaggtaaaagttcact

SEQ ID NO: 2131 - DNA, 200 bp, Lawsonia intracellularis
acacaaggagtaaaagtaaaaaagttttttcaatcttactatttactatataggtatacctagtttttcgcttgtgttaggataactattgataaataatgtatatggttagacgttatgtggttagatccttagttacactaataaggtaaataagtggtgcgcccgggaggaatcgaacccccggccaagagcttaga

SEQ ID NO: 2132 - DNA, 200 bp, Lawsonia intracellularis
aggctcctgctctatcctactgagctacggacgcaacgatttttttcttaggatatgaatgattaaaggtcaagaagaattatcttgttattttgttgaaagaatgaagtatatagtctattcacaaacctatcttattgtattacatggaggttttcatgtatagactttatagcattatcctatgtatagttatcctg

SEQ ID NO: 2133 - DNA, 200 bp, Lawsonia intracellularis
tgttctggttgttctttatggactagaataaagaaagcaataaagagtaatgatactatacaagaagaagtattaaatgaagctgaagctggtactatagctgaagcactttctgaactagatgcagatagagaaaaagagagttcaacttatttaaacaagatttctgataaaaagacaaacattgaccctgaatctgt

SEQ ID NO: 2134 - DNA, 200 bp, Lawsonia intracellularis
tgaaaaaaatactcaacatgtgaagtctgtagatccgtcgccttctttagatgaaacaataccaaaaaagaaggtacagatagataataataataataagttaagccaatcacaagaacaaaaaatgtataaagatgctcttcatctatatgagctgcataagtataatgagtctataacgctttttgatcagtttatgg

SEQ ID NO: 2135 - DNA, 200 bp, Lawsonia intracellularis
aaaaatatcctaaaagtcgcttgatgccaaatgctctttattggaaaggagaaaatttatacgcacaacagaagtttgctgatgctatttttatgtttaaatccgttacagcaacatatccaaaacatcagaaagcttcggatgctttattaaaagtaggaatgtcatatagagcgctaggagatcaagataatgcaacg

SEQ ID NO: 2136 - DNA, 200 bp, Lawsonia intracellularis
ttgcattttagagcactatatgaggattatccaaaatcgacagctgtacaacgtgcacaaaaattaggaatcaaaccatgaaaaaatggaatacttctttggaggggtttctttgaccaagaagttatttcatagtagtgctcttggggcattagatgcagtaagtcgaaaagaattttgggcatctttagctttaaaat

SEQ ID NO: 2137 - DNA, 200 bp, Lawsonia intracellularis
atacaaaaggtcttggaggacgtacatataaaaaacttttaacttcttttggttcagcatttgaggcattacaacaggtaaaaaagtggaaacagcttggaataccaagtgataagtctttaggcatactttccgattcatggagagcaggggctaaaaaagaatgggaggcagttcgaggttgttatggaacaattttg

SEQ ID NO: 2138 - DNA, 200 bp, Lawsonia intracellularis
ctttggactgatccacgctaccctaatttgcttaaggaaatttctgatccaccactttttctatactgtttaggcgatatatcgttacttgaaaatccttgtatagctattgtaggaacaagaaaatgttctatagaaggcattagagttacaagagcttttgcaaaaggattagcaactgctggaataacagttgtttc

SEQ ID NO: 2139 - DNA, 200 bp, Lawsonia intracellularis
tggtatggcgttaggtatagatcgtgaagcacacctttcttctattgattttcctggtaaaactattggagtacttggttcaggaattaacataagttatccacgtcaaaatagtgatgtaagggaattacttgttaataaaggtcttctcatttctgagtatgctcctggtactcgtccagagcctggattttttccta

SEQ ID NO: 2140 - DNA, 200 bp, Lawsonia intracellularis
caagaaataggattattagtggactgtctttaggtgttcttattgtagaagcagcacttcatagtggtagtcttatcacggcacgtttagcgcttgagcaaaatcgttctgtatatgctatcccaggagcaattggttctccatttgcagaaggttgtcaagatcttattcgtgaaggagcaagacctattttttctgtt

SEQ ID NO: 2141 - DNA, 200 bp, Lawsonia intracellularis
gatgatatattacacgatttgtcagaatcgctaaaaggatttattaatcagtataataaacaggatattatatataaagaaaaaaaagagggtttggaggagcaagatatcatgctttctcttcctgcttctaatgataaaacaactgttattaataaacaaagtcaatataaaacatttggaaagatagaacgacagat

SEQ ID NO: 2142 - DNA, 200 bp, Lawsonia intracellularis
aatagatattatcagactagagccaaaagatattgatcaactgtgtcagttattgcaacttccagctgaagaaataagtccaatacttattattttagaaattgagggaattattaaacgtcttcctaatacacagtatgttttagcataatatctatgtaaaagcttattgaacttttttaataacacataacaaatag

SEQ ID NO: 2143 - DNA, 200 bp, Lawsonia intracellularis
tacttattatctattctatgcaacttccagcagtaacagaaacatttttatcatggcttaatcttcataagggattttctttagcaacacaggatgcctatagaagagatatatctcagtttgaagtatatcttagaacaattggacttactcttgagcatccagaacatattaataaaaagcatattcaacagttttct

SEQ ID NO: 2144 - DNA, 200 bp, Lawsonia intracellularis
gcttcattatattataaaaagttaacaaggacatctatagctcgaaagttagcagcattacgttcccttttccgttatcttttaaaaacacaccatataaaagataatcctgcagttggcgtacataatcctaaacaacatgtaaaatatcctgagatacttaacgtagatcaagtatttttgttattgaagggagcaaa

SEQ ID NO: 2145 - DNA, 200 bp, Lawsonia intracellularis
caatatattaaagacatcacatacagggttagaattagctattgcacatagaaataatgcattattagaacttctatatggttctggtttacgtatttcagaagcattatgtcttaatgtgtctgacataagaacagaagatggatttgtacgagtcattggaaaagggaataaagagaggttagcgccactaagtgata

SEQ ID NO: 2146 - DNA, 200 bp, Lawsonia intracellularis
cttctattgtagcattagaagaatggttagctattagacatatggtagcaacattaggggaacaagcactttttgtaggcgttagaggtaaacgattgcataggagacagacaataaggatacttgaagaactgtgtctacaagcaggacttccattaactactgctcctcatacattacgacattcttttgcaacacac

SEQ ID NO: 2147 - DNA, 200 bp, Lawsonia intracellularis
ctccttgaaggaggtgcaaacttgcgtgctgttcaggaactattgggtcatgctagattatcaactacacaacgctatacacacataacgctagataagttaattcaagcctatgataaagcacatcctttttcaggtactctacggttaaaaaattaaataatagaaaccaaaaatggaagtttggcaggattatataa

SEQ ID NO: 2148 - DNA, 200 bp, Lawsonia intracellularis
taaaagtaatatttcttatctagttaggcatgctcaacttgctggatgccatcaagtttccaagaaccctcaccagaagcagggcgtacaaagtgccatatttctcgaacttcaataggggattcttgagattggttttctttaagaagtacattaaaatatacagagacaagttcctcatcttctatttttttcacatc

SEQ ID NO: 2149 - DNA, 200 bp, Lawsonia intracellularis
tactacagatgcattaactaacataatctctgttgtctctggatttggattttcagtaatttgttgctgaagttcatttaaaaaaccaggtgtagtgaattgttgaatatcttctaaatctctattatcccatgcagcattaagtctcacatatgctgcctttgcgcctttaaggaattcttcttcattaaagtctatag

SEQ ID NO: 2150 - DNA, 200 bp, Lawsonia intracellularis
gtatattggttgttatagcttgattagatacatctgctgaatatgttgtgtgttgtgacttgagagattcccaacctgtacctgataatgttgttgaacgaggtataggcatttcagatgttagtggttgttgtgtggcgtaaagtgaattagttacagaagcttcatttgatgtgatttttcttttaaagaaaagccgg

SEQ ID NO: 2151 - DNA, 200 bp, Lawsonia intracellularis
taggctagatatacaagtccagcaataagaatgagatctaaaaagcctcctccagaaaatccatgtcctgaaagtaatgagccaataagcgttcctgctaagagtccaccaaaaataccacctaatccaccaaaaccacgagaagctgtgtttgcaacgcttccttgttgaatttgttgtgatatattagactgttgacg

SEQ ID NO: 2152 - DNA, 200 bp, Lawsonia intracellularis
catcattggtgaagatggaataggctttgaatatggtctattcataaatgatttcccaccaaatgagcgtccgccaccaatacgtgcataagctttatgccatccaaggacaagaactgtaacagtaagtaataaacatatacaaacagtaattttttgaaacatatattgatcctagaaatagttattgttatgcacaa

SEQ ID NO: 2153 - DNA, 200 bp, Lawsonia intracellularis
ccaaggtataaataagagtagaagtaaaaaaaacaaggtttaaattttgataaaaataataagacgatagatatataagttatattgtgaagattagaatttttttttaataagtcaagttttttatatagcaaatttaatgagcgttaatagctagttattggttacgctttttatgtgatgaacgtaatcgaatacgt

SEQ ID NO: 2154 - DNA, 200 bp, Lawsonia intracellularis
attggagcatgatgtaagttaaaaatttttcttaaggagcgttcaagataacgtacatatgtttcagatattttttctgcatcattaacaaaaaaaacaaaagtaggagggctagtttcagcttgagtcaaataaaaaaatttgggtcgtatacgacgtacaacaggaggttgatgacgtgtaataatttcttccatagc

SEQ ID NO: 2155 - DNA, 200 bp, Lawsonia intracellularis
tctatttaggactcctgtattaatgcgagtagaacattcaagataaacttgttctgccatagcaataatttgatcaagtcctgatgacgtcactgcagagaccataagaataggaatatgaggacagaactgtagttcttctttaaatgacttagaaagtaatgtcttttgtttttttgcaataagatctgttttgttaa

SEQ ID NO: 2156 - DNA, 200 bp, Lawsonia intracellularis
taagaagaataaaaggtatttttctagtgtctaaaagatcaagcagacgtttatcttgagctgtgatgccttctgtagcatcaatcacatatagtgtaatgttagctttagttgcactttttatagatgcgtttacagaaaagcgttcaacaggatctgtaatttttgttctacgacgaatacctgctgtatctacaaaa

SEQ ID NO: 2157 - DNA, 200 bp, Lawsonia intracellularis
agatactgtgttttgttaaaaataaaaggaatatcaatactatcacgagttgttcctgcaatattgcttactattagtttatttttaccaattattgcatttataatagaggatttcccagcattagggcgtccaattattgctagttttagtgcagcttgggcagtagactgatcctttatattttcattattgggtaa

SEQ ID NO: 2158 - DNA, 200 bp, Lawsonia intracellularis
taataaagaaagttcattttctagttgtctaatattatgaccgtgttcagccgaaacagcaatcataggtaaacctaagatatgaaattctgcaactatttgatcctctttctctattccatcaactttattgacggcaagtaatattggcttacctgtttttcgaagaaataatgctaagtgctcatcaaaaggtaata

SEQ ID NO: 2159 - DNA, 200 bp, Lawsonia intracellularis
atccatcacgagcattgacaataagacagatagcttgagattcttctatagctaattggacttgttgaaagatatctttttcaaagccatgtaattcatcaatgatattgatagtagaataatggctatctagtataactcctcctgtatcaataagaataaatgatggatgacctatagattgaactagtccttccatt

SEQ ID NO: 2160 - DNA, 200 bp, Lawsonia intracellularis
cgatctcgagtaactcctggccgatcatgtgtaatagctctatttttgcgtataagtctattaaaaagggtagatttaccaacatttggtcgacctactagagctattttcggtaacatacaagttctcttttttctttaaaatggctagtaatatgataataataagaaagaagtatattatttatataagttatgatt

SEQ ID NO: 2161 - DNA, 200 bp, Lawsonia intracellularis
gaatatgataaaactatggctcaatacactctatgcctcccatatatggaacaagttttttaggaagtttaacagagccatctttttgttgaccattttctaagatagcaacaatggtacgtccaatgggtaacccagagccatttagtgtatggacaaactgtgttttttctccagaagaggcacgaaaacgaatatta

SEQ ID NO: 2162 - DNA, 200 bp, Lawsonia intracellularis
gctcgtcgagcctgaaaagattcgcagttagaacatgaagatatttctttatatgtgttttgtccaggaagccaaacttctatatcatatgttttacttgaagaaaaccctagatcaccagtgcacagaacaactgttctataaggaagttcaagttgttccaataatgtttcagcacttttcctcatttgttccaaaag

SEQ ID NO: 2163 - DNA, 200 bp, Lawsonia intracellularis
atcataggattgatctggatgagaaaaatagaccatttcaacttttgtaaattggtgttgtcgaataagtccttttgtatctttacctgcagaacctgcttctgaacgaaaacatgctgtttgagcacagtaagatagaggtaataggtattcatcaataatttcgtcagagtgtatatttgtaagaggaacttctgcag

SEQ ID NO: 2164 - DNA, 200 bp, Lawsonia intracellularis
taggaatcaaaaaatagtctgttccttctagtttaaaaaggtcatctgcaaattttggtagttgacctgtatttgtcattgatttttcattaacaatgagtgggggtagaacttctgtacggccttgggctagatgaaaatcaagaaaaaaattaattaatgaacgctcaagtcgagctgcccatttccatagtattgta

SEQ ID NO: 2165 - DNA, 200 bp, Lawsonia intracellularis
aaacgacttcctgtaattttacttgctcgttcaaagtctaatccttgaagagtggaacctagttcccaatgttcctttggttgaaaatcaaatataggtatttcaccccatctatatatttctttattatcagtttcatcttttccaattggaacactgtagtgtgggatattagggacagcaagcatccagtcatagag

SEQ ID NO: 2166 - DNA, 200 bp, Lawsonia intracellularis
ttcattttttacttgatttatcatattgtctaatacaacaatttttgacgaaagttcagaaagttctgcaataatagtatttgtattttcaccattacgcttcatttgtgcaacttgaatagaagcttggttacgtttagccttaagagtttcaacttcagaaagaagttcacgccgtttagtatcaagctcttcaaaac

SEQ ID NO: 2167 - DNA, 200 bp, Lawsonia intracellularis
ttgttatattaagtggagatcctctatgaataagtgcagttgacactatttcaggttttttttgtaacaatttaagatctaacaacacttgtcctttataattaccattagtatagttatgagtattatcagtagtaaaagtattcttttgtaaagaaaaagaagtataaaagttatattatactgtatcaggtttagag

SEQ ID NO: 2168 - DNA, 200 bp, Lawsonia intracellularis
taaagaaagtatcacgtcaactaatagcttatgttatcttagtaccttattgttttttaaccataccatattatagaagataggattgcatgtcttgtataaaaataatatagtttcttattcataattatatttttaggagaggcctactatgggtaatagtattttacaggtagtcattaaactctctttattttttt

SEQ ID NO: 2169 - DNA, 200 bp, Lawsonia intracellularis
tcataatccttttaggttgtggaccatcaaataaagttaacttgatatatccaaaaggtgaaattgtccttcctaaatcaggagctcctagagtagtggttgtattatttcatggctccaataaacttcatacgattgggacaaaaacggatggttctcactttatgcctacatctccagttactgagtggataagtaga

SEQ ID NO: 2170 - DNA, 200 bp, Lawsonia intracellularis
tctttagcagaggaactctctaagcaaggtttacaagtctcttatgcaagagatttagctcaggcaaagatgagcaatcctaactatatagtgactggaactataagtgaagtatgggtggttgaagaaaaccctgcaacgtttactgctgccattggattaaaagtttctctttcaaataataaaggagtaatttatac

SEQ ID NO: 2171 - DNA, 200 bp, Lawsonia intracellularis
agaaaacttcaactcttctcaagaaagacaatctattccaataggttctcaagttgaagtattactttctaccacattaaaaagtcttcttgagtcaatagctaagaaaattcattcagaaatccactagccacgagaacatcatttatgaatgaagtaagtgtagggatagaagatggagatagtatagcatgtcaaaa

SEQ ID NO: 2172 - DNA, 200 bp, Lawsonia intracellularis
acaatggggatactttagtataattacctatattctcctattttttttgattttttctccatctattactatagcaaaagaacctatacttgaagtaacttatacaattccctaccatgcacatttagttacagagcctgttatacaaatagctgaagctgccactaaattacatgcattagagcagactagaagtaatt

SEQ ID NO: 2173 - DNA, 200 bp, Lawsonia intracellularis
ttacatcaaacttggctgtaaagttagaattaaggacaagggagcaacaattagcattagcatcggctatatattttgtctctattcatgagagaactgtacttgatggccctaaactttctataaaagcacatgtatatccttcatcagaaaaaatattagacgatcatattcgtcaattattacgtcaacaggatcat

SEQ ID NO: 2174 - DNA, 200 bp, Lawsonia intracellularis
cttcagcttagactgttggcagtaaatcagcttgaacaatatattaatgaaggtgttgaacttcttaatcaagcacatctatgttctagtgctgatatacggtgtaaacatgatgattcacttgtaccaaaaattaaacgaacttctaatcgtattaaggcattggagttgtttctagttgaattaaatgattttgaaca

SEQ ID NO: 2175 - DNA, 200 bp, Lawsonia intracellularis
tgtttgggcaaatccagaaaagtctgttttaactttttcagaagcaacagcattagatcctgataattctttattatggttaggggttggagagtgtctggtgcttttaaatagaccatatgaaagtattaaagcatttcagaaagttatgataaagaataatatacctgctcgtacattatatatgcgtggaatagctc

SEQ ID NO: 2176 - DNA, 200 bp, Lawsonia intracellularis
atttacagatgtatcttcctggacttgctataaaagatatttctcaagcattgcagttagagccagagcaccccagttggtggagagctcttggcacagctaaacttgttgcaggtgatacagtagcaatgtgtgccgatttttatcaagcatgtgctatgggggattgtgaaggactagctgaagtccgtgaacaaaat

SEQ ID NO: 2177 - DNA, 200 bp, Lawsonia intracellularis
ttttgtttagtatctcctgaattttaatatagaaaaaaattataattacatggtaataatttttataggttctagataacgttagttatgaggcaaatatgaaagtatatctcattggagcaggaccaggtgatcctggtttacttacagttaagggaaaagaaatattacagcaagctgatgttattatgtatgatttt

SEQ ID NO: 2178 - DNA, 200 bp, Lawsonia intracellularis
ttagttaatgaaatcctgcttaactatgcaaaaccagatgctgaaattatttatgttgggaaaaaaggtaattcatcatatacctcacctcaagatgaaataacacaattacttataactaaggcaaaagaaggaaaaataatagcacgattaaaaggaggagatccatatatttttggtagaggtgctgaagaagctga

SEQ ID NO: 2179 - DNA, 200 bp, Lawsonia intracellularis
agcacttgttttagctggtattccgtttgaagaaatacctggtataacaagtaccattgctgcacctgcatatgcaggtattcctttaacacatagagattatacatcgtcagtaacatttattacaggacatgaagatcctgataagattgattcagcccataattggtctgcattagctcatagtgcgaatacattag

SEQ ID NO: 2180 - DNA, 200 bp, Lawsonia intracellularis
tttttgtgatgggcatgaaaaatcttcctgagatttcaaaaaatttaatacaagcaggattatctcctgatacaccagcagcacttattttttggggaacaacagcaaaacataagagtttagcttctacagttaaaaatctccctgaagaagcaaaaaagaatggttttacaaatccttctattattgtcataggtaag

SEQ ID NO: 2181 - DNA, 200 bp, Lawsonia intracellularis
gttgttacatttcatagtacattaaattggtttgaacaaaaaccattattaggaaaaagtattgttgttactcgtgcaagagagcaggcaagttctttagcaaggctacttactgaattaggagctgaagttattcagtttcctacaattgatataacaccagttacagaaacagctacgattgatcaatatgtacataa

SEQ ID NO: 2182 - DNA, 200 bp, Lawsonia intracellularis
aataaaagaatatgattggattatctttacttcagtaaatggtgttcgatttttttgggaacgtcttatagcttttaaattagatgcaagggtatttgcaggtgtgagtattgtagctattggacctgctacagcagaagctataagagaaaaaggaattcagcctgactttgttccagaagaatatattgcagaaagta

SEQ ID NO: 2183 - DNA, 200 bp, Lawsonia intracellularis
ttgcagatggattagtgaaacttggagttaaagggaaacgtattttactcccaagagcacaagaagcacgagaagttcttcctaacaagttacgcgaggctggagcaacagttgatattgtcccagtttatgaaacacgtcttgctattaaacttcaggataatatattacaactcttagaacaaggaacgttagattgt

SEQ ID NO: 2184 - DNA, 200 bp, Lawsonia intracellularis
attacttttgcttcttcttcaacagtagagaatttttttgaacatattcctataactgtgctaaaaaaatatcgtcttccaaaatttgcaactattggtccagtgacatctaatacattaaaaaaatatggatttgagtatgatatacagccaacaaaatacacgattcctgatttagttaatgctatcgctgataccta

SEQ ID NO: 2185 - DNA, 200 bp, Lawsonia intracellularis
taaaggttaatataaaaaggtagaaaggtttttataatatgtcattaaaaatagctgtatttggctctggaaatggaggaaattttcaagctattcaagatcatattacaaaaggcacccttaatgcagaaattaaactcttagtttgtgataagtctgatgcttatattatagagagagctaaaaaggagaatattcct

SEQ ID NO: 2186 - DNA, 200 bp, Lawsonia intracellularis
tattttattgttagttatacaaaagataaaagtagagaggagatcgataaaacaattcttgatgcagttcaagaggcagatgtagatgtacttgttcttgcagggtatatgcgtctactgtcatcagttgtcattaaggtgtttcataaccgtattctaaatattcatccctcactacttccagcatttcctggtgttca

SEQ ID NO: 2187 - DNA, 200 bp, Lawsonia intracellularis
tggtatacatgatgctcaaacatggggtgtaaaatttacaggatgtactgtacattttgttgatgaaatgatggataatggttctatcattatccaagcatgtattcctgtcgtagatggtgaatcattggaaacattacaacagagaattcatgaacaagaacataggatatatccacaagcattacagtggatggcag

SEQ ID NO: 2188 - DNA, 200 bp, Lawsonia intracellularis
ataataggcttgaattatgtgaaagtagtaggatggttaaagttaaaggagataaccatagggggttggcaccattgagttatggtgtacttattaatccacctcttgaggaaggattttagatattttttatattaggtatggaaaaataaactcattaatataggtaaagagagttctgaaataatagataacgttta

SEQ ID NO: 2189 - DNA, 200 bp, Lawsonia intracellularis
aaagcgtttcactcttaaatgacaacctccacgtcctgttttttctgtaaaattttgatgatattcttcagcaggatagaaagttgatacaggaagaagttgtgtaactataggtagattagtttgttttaattgttttattatttgttctgcaatatctttttgaagttcattggcataaaaaattacagatcgatatt

SEQ ID NO: 2190 - DNA, 200 bp, Lawsonia intracellularis
gtgtccctatgtcaggaccttgacggttatattgtgttggatcatgtatttcaaaaaaaagttttacaagatctttgtaactaacttgcatagagtcaaaatgaacatgtacagtttctgcatgtccggtttgaccagtacaaacttgttcatatgttggattttttgtagatccacccatgtaacctgatacagcatca

SEQ ID NO: 2191 - DNA, 200 bp, Lawsonia intracellularis
ataaccccaggtgtattttgaaatacatcttcaatgccccaaaagcatcctccagcaaaataggcatcttctttactcattttctgtttgctcaccatttgtatgatttttattctgtgatagttctatacttggttcaaatagtaatgagagtgagtttacacaatgacgaacatttttttgagtaaaattttctcctt

SEQ ID NO: 2192 - DNA, 200 bp, Lawsonia intracellularis
caaagacatgtcctaaatgaccattacatgtactacaaacaatttctgttctatatccatctgcgtcaggtaattgtttcaccgcattaggaattgtgtcatcaaaactaggccaaccacaacctgaatcaaatttgtctttggagttaaaaagaactgcaccacactgcctacaaatatatgttccttcttctttatgg

SEQ ID NO: 2193 - DNA, 200 bp, Lawsonia intracellularis
ttaacatatttccctgagaatggaggttctgttcctttatgaagaataatccatgcttctttatctgatagcggcttcatataattatcctaataaataaattacgatagaatatctctacatgttacgaatgactatagtcaatgatatcttttcctaagagttgagtaataagtactgtcccacttgtgaggttagta

SEQ ID NO: 2194 - DNA, 200 bp, Lawsonia intracellularis
agctcattctgaaagctttggatatattcattttgtatagagataacataggtaacatcactggtaaaaagttcattaataattatacaatgaaattgttggagaagatgtaaaaaggaggaaatatgttcataacttaaaacaacctctagtgttgttgatatagccatctttttaagaggtaattcttctaatccaag

SEQ ID NO: 2195 - DNA, 200 bp, Lawsonia intracellularis
ttgaatggtttgttggtaagctcgcattagcccacctttacctagtttaattcctccaaagtagcgtgttattatagcagtaatttcaccaatttttttatggataaggatattcatcattggtcttcctgctgtaccatgtggttctccagcatcagagtaaccagtatatattgttttctcaggagcaccagcaataa

SEQ ID NO: 2196 - DNA, 200 bp, Lawsonia intracellularis
aagcccaacagtgatgactagcattactaaattcatattttaatttttctataaaattttttgctgtttcaactgttggtgtatgtgcaatacttatgataaatcgactttgtctgactgtcatttctcgacgatgaatatcagttaaattaatatttggtatgaagtaactaagtgacattcagaaaaaatatctttag

SEQ ID NO: 2197 - DNA, 200 bp, Lawsonia intracellularis
ttataatcagatgcaataaaaagcttttatagtattatatttataggtaacctggaggctaatacaaggctagagcttaaataagttcttgccattagctaattataaatactaaaaaagaaaacatcttgaagataggatataattaaaaggtataataaaaaataaaagggagttagttagccctaaaacgacatcca

SEQ ID NO: 2198 - DNA, 200 bp, Lawsonia intracellularis
actattatactaagttgaacaagctaatatagtaactatatacattttttaggtaatagttagactgttataacgtttttataacatagagtatgttaacattaaagtaagatatgttgatatataacaaacaaatgagatttttataattaatataaaattatgatagttaaatatgatattttagataaataaaaaaa

SEQ ID NO: 2199 - DNA, 200 bp, Lawsonia intracellularis
tttttaaaattaataagttagttataaccccttagtttggttaaaaataaatttttatttatttacattgaagaatattgttttaatgatatatgttatttgatttagtcaaggaagttgacatgtagtaataggttttatgctatatgtgtttattgtactattagtaatgaatagattattgcttatagataaccaca

SEQ ID NO: 2200 - DNA, 200 bp, Lawsonia intracellularis
tgatatgtgaatataagtaagaggtattaatgttaggtattttttctatggaaactacaaactgggcagctgaaagccttgcagttatttgtggtagtgcttttttatggggattgggtagttcacttttaagtccatgtcatttaggaattgtacctattttaggtagtcatgctgctgggtacagtatttttggttca

SEQ ID NO: 2201 - DNA, 200 bp, Lawsonia intracellularis
aacacaaatcctttgcgtcaagtgttgttatttacattaggttttttccttacaattcctctcattggtttgttaattggttttattggttatggcctccactttggagggcattattggactattccttctggatttctactgttatggttaggatgggatatgacacgtggacacagctgttcacatttgtcttattt

SEQ ID NO: 2202 - DNA, 200 bp, Lawsonia intracellularis
attaggcagaataagaactcggcttggccttggtgtgtcttctggtgcattagtactaggttttgcttatggatttcttgctggaggatgttccgcagggtttcttgtccccatctatgcacttaccttacctagtagtatatgtgtatatgtagttattgctgcatgttttggattaggacatacattaccaatgacta

SEQ ID NO: 2203 - DNA, 200 bp, Lawsonia intracellularis
ttgcaggtggttctgtttcattagcaaaacgttttctaggtgataaaagatgttgtgatcaaaatagtaaatgtgaaagtaagacaaatgaaccacatagtggagaggcaaaatttcgtaaatttgtaggaattattactattattataggtattctatttatattacatccatttcttgaaagttgattttctaactaa

SEQ ID NO: 2204 - DNA, 200 bp, Lawsonia intracellularis
aattaaacagtgttattttagcatatattaataagtttaatatattgataactcaatagatgtttgtattataactggtagttattgttaccatatattatactatagcagtaaatttatagataattagttctttgttgctgggatacttttaataacacgacaagggttaccaaatgctaagacaccatcaggaatat

SEQ ID NO: 2205 - DNA, 200 bp, Lawsonia intracellularis
ctttacttactatacttccagcgccaatagtactgttatctccaatggttactcctggtaagacaataacattacctcctatccaaacattattacctatagttatgggataagcatattctaaccccttatttctttgtaaaacatctaagggatgcactgctgcatagaagccacagtttggtccaataaaaacatta

SEQ ID NO: 2206 - DNA, 200 bp, Lawsonia intracellularis
ttcccaaaagtgactttagctgtatctagtatagtacaattatgatttgcataaaaattttctccaatttcaattaagtatccataatcacaccataggggttgctcaataagaaagtgttctcctgttttaccaaagagcttttttataatgtttctacgttcttccatttttatagggtgtagctggttatattcgta

SEQ ID NO: 2207 - DNA, 200 bp, Lawsonia intracellularis
gcatagctccttacatcttaagcgttcttctataagcaaaggatcagtatttgcatcatataataatccattccttgctttttctttttccgtcatgataagctcctaagtaataaaggtaaggtaacttcttttggactactttatttattattattattatttgcaaaagagtataagctaggtaatggaaaaaacat

SEQ ID NO: 2208 - DNA, 200 bp, Lawsonia intracellularis
aaaattaattgttaaacagatagtaacttatttagccttatattataaaatatattttttctatgaagtagaaaagactattttttattagagacttgtatcttttaaaaataatgcctatctctataaaaggtcttttttggggtttatgtttgttatataggaagattttagaattatagtaatgataaaaaaataat

SEQ ID NO: 2209 - DNA, 200 bp, Lawsonia intracellularis
ctatggatttgtagttttttagtaaggttacttttttattgttatagctaataattatagtgagatattgagtaaaagttagaggtaatctaaaagataatagtatactttttataatattataataaaattatatattatcataatatttatataagtgaacatagttttctaaaaagactataatgatcctcattagg

SEQ ID NO: 2210 - DNA, 200 bp, Lawsonia intracellularis
aggtatttttgtggctgttgagtacaaagattattataaagttcttggggttgagagaaatgctacaaaagatatgatatctaaagcatataaaaagcttgctaaaaaatatcatccagatcttaatccaggtaacacagaggcagaagaaaaatttaagaatattacagaagcttatgaagtacttaaagatgatgaaa

SEQ ID NO: 2211 - DNA, 200 bp, Lawsonia intracellularis
aaagaaaaatgtatgatcaactaggttcaaactggaaagatggtcaatatttccagaacgaaagtggatttgataattttagctttaatttcggcggagatgcctttgggggctctggttttagtgacttttttgaatctctttttggtggggggcaaagaggtagaagtagtgggtttagtgggttttcttctcgccaa

SEQ ID NO: 2212 - DNA, 200 bp, Lawsonia intracellularis
catcgtggaagggatattgaagctgaaatttctatttctcttgaagatgcactccatggtggtgaacgtagttttactctacaaacgccagatggtccaaagacattaaaagttaacattcctgcaggtgttcgtgaaggtgctaaattaagacttgcaggccaaggatactctggctcaggtggaggagcaacaggaga

SEQ ID NO: 2213 - DNA, 200 bp, Lawsonia intracellularis
tttatatttacatattcgctttttgcctcattctcagtttcatgttgaaaataataatatcacatacaatgtacaaataatgccttgggaggctgtattaggaacaaaaattagggttcctactcttgaaggaaatgttgagctttctgttcctgctggaacaagtagtggacgtaaaatgcggctacgtggaaaaggat

SEQ ID NO: 2214 - DNA, 200 bp, Lawsonia intracellularis
taggctcttcaaattctcgtggtgctctttttgttattataggtattaaaacacctactaaccttacagataaacagcgtaaattgtgggaagagctagctgctaatgcagaaaagtgaaggtaaggaggttcgtatatggatttgttacaagacaaaaaagacctacccagctgctccagatttatagtatggtcagag

SEQ ID NO: 2215 - DNA, 200 bp, Lawsonia intracellularis
tttatagaactcacaggaacaactcctgagcgtgtctttgagcttattgaaataggctggcttgaacctgtacgtaccgcagaaaatattttgttatttcaacaaagagatgtttataaattacgaaagcttgaacgaatttgtatggattttgaaatagatacactaagtggaagtattattattgatcttcttgaacg

SEQ ID NO: 2216 - DNA, 200 bp, Lawsonia intracellularis
tgttgatagcttagaaaaaagagtaagaatgctttcatcactttattaaagttataatatttagttaactaaaaacagtaattgaaattattcttatatacttattatatacttatactgaagaagtagaggttgtattatggatgtgaataagctcacacaaaagtctcaagaagcattatcagaagcacaaagacttt

SEQ ID NO: 2217 - DNA, 200 bp, Lawsonia intracellularis
ctgctcaatatgggcatcaggaagtagatgtagaacatttagcattggcacttaccatacaagagaatggttttgttccaagggttcttgaacaagcaaaagtacatgtaaaagttgtgatttcagcattagaagaagtattaaaaaagcgtccttctgttcgtgggcctggaagtgagatggggaaaattactatctct

SEQ ID NO: 2218 - DNA, 200 bp, Lawsonia intracellularis
caaaggctaagtaaagttattgccaatgctgaattattagcaaaacgattgggtgatgagtatgtaagtgttgagcatctttttgctgaatgtcttaatgagccagagtcaacaggaatgggacaagttgcaaaagagatacaccttacgtcacaaagatttatagaagttatgttagctgtgcgtgggccacaccgtgt

SEQ ID NO: 2219 - DNA, 200 bp, Lawsonia intracellularis
tacatctcctactccagaagatagttacgaagcattaaaaaaatatggaagagatcttgtagaagctgctcgaaaaggaaagcttgatcctgtaattggacgggatgctgaaatccgtagagttatccgaattctttctcgtagaacaaaaaataatcctgtgcttattggtgaagctggagttgggaaaacagctatag

SEQ ID NO: 2220 - DNA, 200 bp, Lawsonia intracellularis
tagaaggattagcttttcgtatcgttcaaggagatgttcctgaaggtttaaaagataaatctatttttgctcttgatatggggtcactgattgctggagcaaagtacagaggagaatttgaagaacgtcttaaggctgttttaacagaagtcgagaagtcagaaggaagaattgttctttttattgatgaattacatact

SEQ ID NO: 2221 - DNA, 200 bp, Lawsonia intracellularis
attgttggagcaggaaaagctgatggagctatggatgcagggaactttttaaaacctatgcttgctcgtggagagctccattgtattggtgctacaacattggatgagtatagaaagtatatagaaaaagatcctgcattagagagacgttttcaaccagtgatggtagatgaaccttctgttcaagacactatatctat

SEQ ID NO: 2222 - DNA, 200 bp, Lawsonia intracellularis
tttacgaggattaaaagaacgctttgaagttcatcatggtgtgaggattagtgattctgctatagttgaagctgtagtcctttcagatagatatatctcagatcgtcaactaccagacaaagcaattgatttgattgatgaagctgcagctatgatccgtacagaaatcgactctcttccatctgagcttgatgaagtta

SEQ ID NO: 2223 - DNA, 200 bp, Lawsonia intracellularis
atcgtaaaattatgcagttagaaatagaaagagaagcccttagaaaagaaagtgattcagcatctcatgaaagattagtacgtttggaagaagaattaaaagtactgcaatcaacacagtctgaattaaaaaagcaatgggaaactgaaaaaggttcaattgattctcttcgaaacataaaagaacaaattgagcagaca

SEQ ID NO: 2224 - DNA, 200 bp, Lawsonia intracellularis
cgacttgcaattgatgaggctacacgaaatggtgagctaagcaaggcagcagaattaaaatactcaaaactgtttgaattagaaaaacaattagaagaacgtgaatcaaaggctgatggtccacgtttacttaaagaagaagttcgtccagatgatgttgctaatattgttgctcgatggacaggtatacctgtaacacg

SEQ ID NO: 2225 - DNA, 200 bp, Lawsonia intracellularis
actgttagaatctgaaaaagaaaaattgttacgattgccagatacattacatgagcgtgtaattggtcaagatgaggctgtgaatgtcatatgtaatgctgtattgcgtacacgtgcaggactttctgatccaaagagaccacaaggttcttttatttttcttggacctacaggtgttggtaaaacagaactttgtaaag

SEQ ID NO: 2226 - DNA, 200 bp, Lawsonia intracellularis
ctcttgcagaatctttatttgatactgaagaaaatatggttcgctttgatatgagtgaatacatggagaaacactcagtagccaggcttattggagctcatcctggttatgtaggttatgaagaaggtgggcaacttaccaatgctgtaaaacgtaaaccttatagtgtcatattatttgacgaagtagaaaaagcacat

SEQ ID NO: 2227 - DNA, 200 bp, Lawsonia intracellularis
cctgatgtatttaatatttttctacagttacttgatgatggacgtttgacggataatgctggccgtactattaattttagaaatactattatcattatgacttcaaatataggcgcatataaattacttgaaggtattagtcctgatggttcttttcatgaaggtgtatatgagtctgttatgggtgatttgaaacaaca

SEQ ID NO: 2228 - DNA, 200 bp, Lawsonia intracellularis
ttttagaccagaatttcttaaccgagttgatgatgttgtactttttaaaccacttctggctgatcaaataagtagtattatagacttacagttaaggagtttaaaaaaacgcctagagtcacagaaagttacattagaattaacacattcagcacatttatatctagctgagaatggatatgatcctcattatggagcac

SEQ ID NO: 2229 - DNA, 200 bp, Lawsonia intracellularis
gtccattaaaaagataccttcaacgagtagtggaaacacctttagcaaagatgattattagtggtaaagttcatgaaaatcaacagattgttatagattactcagaaagtgattcttctttacaatatggtgtgaaaagtgcatctgaagatatcaactgggttcaagtataattataactttaatttttgtaattatta

SEQ ID NO: 2230 - DNA, 200 bp, Lawsonia intracellularis
acgataacaggttatttattatacatattatttattataaaatttgtttaagaaattgctgaagtcgtggatgttgaggtgaggtaaaaatagtctctggggggccagtttcaacaatttgtcctttatccataaaaataacatgatcagccacttcacgagcaaaacccatttcatgagtgacgacaatcatagtcatg

SEQ ID NO: 2231 - DNA, 200 bp, Lawsonia intracellularis
ccttcttctgcaagtgttttcattacttcaaggacttctgttaccatttcaggatcaagtgctgaagttggctcatcaaacaacataattttgggatgcatagcaagagctctagcaatagcaactctctgttgttgtcctccagacaaataggatggataaacatttattttatctgaaagacctacctttttgaggag

SEQ ID NO: 2232 - DNA, 200 bp, Lawsonia intracellularis
ttgcaaagcttgttcttctgcctcatgggtagaaagctttcttaaatggatgggagccattgtaatattttggagtacagttttatgagggaataggttaaaattctggaataccatccctaactcttggcgaatggtattaatatcattttctgatgagttaatatcaaggccatccacaatgataagtcctttatcaa

SEQ ID NO: 2233 - DNA, 200 bp, Lawsonia intracellularis
tagtttcaagtcgattaattgaacgaagaagtgtagattttcctgatccagaaggaccaataataactactttctctcctggtattatttctaggcttacatcatttatggctgtaagtgatccaaaaaatttccaaatattacgaatggtaatgataggttcagtcatagttctcctggtcataatgatcaagtttccc

SEQ ID NO: 2234 - DNA, 200 bp, Lawsonia intracellularis
ttccataatacttactcctttagagagtaagagtgtaataattagatatacaatagcaattacagtatacgtttcaaaatattcaaaggttactgcagcatactcccttcctcgacgaagtaagtcagctacagcaataatggagataagtgatgtgtctttcagcatagcaatacattcattaccaataggtgggagaa

SEQ ID NO: 2235 - DNA, 200 bp, Lawsonia intracellularis
tagctcttagagcttgaggtaaaatgacataccgcattgtttgatatttgttaaatccaagagagcgtgcggcttcttcttgtcctttaggaacagtaagaatacctgctcgaaatacttcccccatataagcaccataacaaaaggtaatggcaatgatagctgatacaagcggagaaaaatggcctagtgcataatag

SEQ ID NO: 2236 - DNA, 200 bp, Lawsonia intracellularis
atataaaaaagttgtacaagtaaaggaatacctcgaataacttcaacataagtagaggtaagaatattgataatacgatttttagaaagtctaccaaaacctacaagaagacctagagggagagtacaaattatagaaagaaatgtaacttcaaatgttacaaaaatgccatcaggaagaaatgctaggatgtctatgta

SEQ ID NO: 2237 - DNA, 200 bp, Lawsonia intracellularis
gttttctgagccaaaactacataggagaactaaaagaagaattgatccaaaaaatgcaatattccaagcattgataatattcctttccctaggatctgggatagaagctccgtctgtaatttcaatgcgtatgcttgtattttgcatatatgttttccatatctttatatgttattgagctatttatatgtataaaatta

SEQ ID NO: 2238 - DNA, 200 bp, Lawsonia intracellularis
atgcatgatccacttctttattaatgcagcctcaattcctttttcttttactgctttgacaccagcattaattttctctaataattctttattaccttttttgactgcaaacccatactgttctatttcagtagtaatgaaagctatagtaatatgatctgtatattctggttgttgttttataaaatagtttgctacag

SEQ ID NO: 2239 - DNA, 200 bp, Lawsonia intracellularis
gttcatcacaaatgacagcatcaaggcttccattagaaagatcttctagcgcaagacctatttcatcataggtttttactatagcttttacttttgctttaggtaacgtttctataagacctgaagtgccaatctgtccacctacttttttcccatttagatcctgtatactttttattggtgaaccattagggactaca

SEQ ID NO: 2240 - DNA, 200 bp, Lawsonia intracellularis
atagcttgatgaacattatagtatggtttactaaaatccattactttttgtttacgtttatctgtaattgttacagaagaggcaataatatcaataagatcagcattaagtgcagcaaatattccatcccaagcagtattacggatttctatgttaattcctgcttctttagctacagcagtaatatagtctgaagagta

SEQ ID NO: 2241 - DNA, 200 bp, Lawsonia intracellularis
cccgacaacctttttgtgttcatctaaattttccattgggggccatgttgcatcagaagcaacaatgtaaatatcttttgcaatactggtagaagaaaaaatacttaatatagtgagtatgcttagaaagccaaaagtgcgaagcatggtttgctatactccttgaatatgtctatctattatagatatattattcatat

SEQ ID NO: 2242 - DNA, 200 bp, Lawsonia intracellularis
attttttatgtttttaaaaagaattatagatattttttgtttaaaaaagtatgaacagatatttataatatatgttaaccaatatctattcaagagataattatatatcatttattatgattttctgtaaaaatagaaagagtaattctatattattttatatcgttattaaaaatgaaagtaggtaagttagataatta

SEQ ID NO: 2243 - DNA, 200 bp, Lawsonia intracellularis
gtaagagtagaaatatagagttaggatacagtatgatataaatgaatagatattattaaggttagtaggtaaattttgatatgaaaaaggtatggaatattttttttgatcgtgatggcactcttattgaagataaacattatctttcgaatcctagagatctagtattattaccgaatgtaggcctagcattagaaaag

SEQ ID NO: 2244 - DNA, 200 bp, Lawsonia intracellularis
cttattaagaatggatgtcatttatttttagtttctaatcagtcaggagttggaagaggtttgtttactgaaacatctgttttagcatgtcataaagagcttacaagacttcttgctggttatggagttttttttactgatgctctctggtgtgtacatgctccatcagaaaattgtgattgtcgtaagccaaaacttgg

SEQ ID NO: 2245 - DNA, 200 bp, Lawsonia intracellularis
tatgtggaaagcactatctcaaaaacatagattaaccgcatctgaaacaataatgattggagataaatgtgatgatataagttttggtgtaaaggcagaatttttagcttctattcttgttaaaacaggcaaaggtgaacaagaagctataaaatgtggatatcgttttcctgagaagggatgtgctcctatggaagtaa

SEQ ID NO: 2246 - DNA, 200 bp, Lawsonia intracellularis
caaaaaataaatctacatgtattttaactacacaatctattatggatgctgtatcatggatattacaagaataatcttccagaaaaaagagtatatactatataaaacagtgtggctcagtaattaacttatatcatgagataacaattaatagtttttattaagtagggttacatgaaatttacttcatttgatgatgt

SEQ ID NO: 2247 - DNA, 200 bp, Lawsonia intracellularis
tcaaaattttttagataatcttggtttgtttaatatcgatttagagcttactcgaatgaatcaagcattgaccaaacttgattttaattctttgccatataaagttgttcaaatagttgggacaaatggaaaaggttctacagctactttccttgcatctttagcaaaatctcatggtttaaaggttggaatatatactt

SEQ ID NO: 2248 - DNA, 200 bp, Lawsonia intracellularis
ctccacattttgtgacacctcgagaacgtatttgtattaatggtgaaatgctttcaccagaggtatggattactttaactgaacgtatcttagataatacactatctttaacatattttgaattattaacagtattagctattgttgctttttcagagtttaaggttgatttggctatactagaggcaggccttggaggg

SEQ ID NO: 2249 - DNA, 200 bp, Lawsonia intracellularis
caacatgatgcaacaacagctgttcctgcagatttggtatgttatacaccaattgatcttgaccatgaacaattccttggatcaacagttgaagcaattgcaaaagaaaaatcacaagcaatgcgttttagaaaacctgttctttcaagttttcagcagcctgaagtaatgagcatactttgtgctatggctaaagaaaa

SEQ ID NO: 2250 - DNA, 200 bp, Lawsonia intracellularis
aaattgctcttttcagtctctagaacaaattagtttagtatatgatctcttttaccctaatctagatggtagtcagacaaagtcagaatatttaactttaggcatggctggtaagcatcaacgtgttaatgcacagcttgcgttagcagcatggcatgtactttcacagaactttggatgggattttaatcttaactgta

SEQ ID NO: 2251 - DNA, 200 bp, Lawsonia intracellularis
tttataaagggcttgctcatgcgtttattcctggacgatttcaatatgttcctcctaatccatcattaggctgccttcctactatacttgatggtgctcataatcctcatgggttagaagcatgtattgctgcatgtaaatctataggaatccgcccaggagccattattttttcctgttttgctgataaaaatattaaa

SEQ ID NO: 2252 - DNA, 200 bp, Lawsonia intracellularis
gagatggttgaacttgttcagatatttgcagaagggatcccattatttattccaacaatccaagttcatgagagagctatgtgtagcaacgagctagcaaaactgtttaaatgttctgttcagcctgtacaacgtcttagtattgcattacaagctataaaaaattctgatattgaaattagtgaaaaacgtcctatagt

SEQ ID NO: 2253 - DNA, 200 bp, Lawsonia intracellularis
tattctaggttcattatatttaattggagaattttttacactctaccctcatgtattatcttcttctataggtatgatataaaaatatagtatacattttatagtggtaagttcaatgaatatgctgttacgtcaattaccttctgttgatatctgtctacatgcaatttttaaagaagatactacactatatactgtaa

SEQ ID NO: 2254 - DNA, 200 bp, Lawsonia intracellularis
cacccagacttttattacgtgaacttattaatacatttcttgataaactaagggaagatgttaagagcggtaatattactgatagttcttttcttactttggactatattttacctcaattactgacatttataaaaagacactcctctttaaattgttgtaaggttattaatgccactggcgttattcttcatacaaat

SEQ ID NO: 2255 - DNA, 200 bp, Lawsonia intracellularis
atgggtagatctattcttcctcaagaggcactacaagctattaacactatatgtagtggatattcaaatcttgagttaaatttaaaaacaggagaaagagggagtagatatagtcatgtagtaggactattgtgtaagcttacaggagcagaggccgctattgttgttaacaataatgctgctgctgtattacttacatt

SEQ ID NO: 2256 - DNA, 200 bp, Lawsonia intracellularis
agatacgctttgtaaagggaaagaagttattattgctcgtggtcagcttgttgaaatagggggtagttttcgtatccctgatgttatggagcatagtgggactaagttaaaagaagtaggatgtacaaatcgtgttcatttaaaagattatgaaaacgcaataactgttgatacagctgctattatgcatgttcacacat

SEQ ID NO: 2257 - DNA, 200 bp, Lawsonia intracellularis
ctaactacagagttataggtttccatagtgaagttagtttaaaagatttggttatgttatctagtaaacataatttactttgtatcgaagatttagggagtggtagttttattgatttttcacagtatggtcttttaggagagccaactgtacaatctgttattagcgcgggagttcatattgtaaccttttctggcgat

SEQ ID NO: 2258 - DNA, 200 bp, Lawsonia intracellularis
aaagttcttggtggtcctcaggctgggatcattcttggtaagaaagagactattactcaaatagcactaaatcccttaaatagagcattacgtatagataaaatgacacttatagctcttgaatcaacattaaaactatatcttgataaaaaacaagctgtaacaagaattccaactttagcaatgataactatttcacc

SEQ ID NO: 2259 - DNA, 200 bp, Lawsonia intracellularis
taacttgttggaagaaaaagctaaaaatattctttctaatctaaaaaaaatatgcggtgaaatgatagaatgttctattgttcctggattttctcaagttggtggtggtgcatttcctgaatataatttaccaacatcacttatctatcttcatcctactatttgttcttcagaaaaattaaaaatgcaactgttagatg

SEQ ID NO: 2260 - DNA, 200 bp, Lawsonia intracellularis
tttctcctcctatattaggaagaattgaaaaaagtgcattttgtatagatccaagaacaatagcagatacagaaattgatttagttactacagctatttcacaagctatagatgctattaatattataaataataaataatatatcataaaatattaaataattactgacataaaaatagatgattggaatatattacta

SEQ ID NO: 2261 - DNA, 200 bp, Lawsonia intracellularis
atactatttttagattgttataaatagtatgttatattctatagctttcttgtagattattatttaaaaagatacatgagttaatgtatctttttatttatagttagggttgagtatggctataaaaattatagagcattctccattttgtatagtaaaaataatagactctctttctatagagaatgctattgctatac

SEQ ID NO: 2262 - DNA, 200 bp, Lawsonia intracellularis
agcaggagttagaaaatatatttgttacaagtgttacattaggagaacttgttctggatttatctaatgttcaaaatgttgatttttcagggataggaggggttatagcagcattattctttgcaagagcaaagggtattactgtgatactttaccgtcctactaaacatattcaagagatcatgtggaaaatgcagaca

SEQ ID NO: 2263 - DNA, 200 bp, Lawsonia intracellularis
aataatctttttcctcttattctttcagaagaggagcttataattcatgcgttaaatagttagtagttatattatgtattcgttttggagtttttctatatttgaaggatatggaatattatattctattgtgatgttatctaggtaagttttatgaaaatgtatttacaacattattttaatcctgactttgactatct

SEQ ID NO: 2264 - DNA, 200 bp, Lawsonia intracellularis
tcaattacagccaattgttagtgttaaaggacaagctgacttgtataacttaggatatgttcagaatgttgttaaaggtcaagtcattgctgaaatgatacctcttgaagcaatagaaaatccaattcctcgatttgtgcttgaacaagaaaagtttcctcagggaccaaatacatatattgatcctgcatatccacatt

SEQ ID NO: 2265 - DNA, 200 bp, Lawsonia intracellularis
atttactttctgacgtcaatgggtatgttttttattataatggtaagatatctgtaaaaaaagttttgaatgttcgttcaaatgtagactttcatacaggtaatattgcttttgttggtgatgtcatggttcataaagatgtcaaagctggttttcaactacaggcaaatactattattataaatggaatggttgaaggt

SEQ ID NO: 2266 - DNA, 200 bp, Lawsonia intracellularis
ggagaagttcgttcaagaaaagatatgaagattattggtggtgctcgaggtggagttagtaatcgctgtcttctttcgtctggaggaagtcttcatgttaactttactgaaaaagttgaacttcgatcaaaaaaaaggatgattgttgaacgtttttgtatgcaatgcaaagtgtatgcagaagaaagttttattgtttc

SEQ ID NO: 2267 - DNA, 200 bp, Lawsonia intracellularis
aggattagtagctggaggtattattcaagtttcaaaacatgtttttattaaagaaaaattaggaaatacatcaggaataccaacgcatatttttttaggatataatccatttcttctgagaaaactagaaagttgtgataatagcttagggatattaagtgaaaaaataacaaattataaaacaattattgatcaatcat

SEQ ID NO: 2268 - DNA, 200 bp, Lawsonia intracellularis
cttcttctacagatgaaattcatcaaaagttagaagaggttgttcagcaacataatcagttatcaaaatatagaaatactatatggaaactgttacaacttgatgaggctaaagcattttcttgtcgcttagttgttccagggatagtatatcctggtgtagaattatctataggtaatgctagtttttctgttaaggaa

SEQ ID NO: 2269 - DNA, 200 bp, Lawsonia intracellularis
gaacttaataatgtatgtttcaggcttcatgaaaatgaaattatttatgagtcagtccctgcaactcttcttccttttttttaaaaataatgaataagtatattcaatatgatgagaacggagatatcattgatatcattatccagatacaggatagatctatatccatgttaggttctggggggaagataagagaaaag

SEQ ID NO: 2270 - DNA, 200 bp, Lawsonia intracellularis
aaaattgccagccattttattacagcattgcaaaaagcagaaatgtcttcaaaagtattaccagttctcttaggaagtggtgcaggatatgcattaaaagagattttagaaaatacaacaagtccaattgctgtgattgataaagagttttttcttaatgatacacaattgaaagaaaaaattactgatcaaagaatcaa

SEQ ID NO: 2271 - DNA, 200 bp, Lawsonia intracellularis
ttggatttgctcatccaatatcgaagaggtattttctgctctaacacattggcaaatacagcatggtcgtttacctctttaccctttagtgcatccattttactttagaatagataaaccttggtatcaaaaaattaaacaatatgttgcagcaagtacaagatttgacttttggtctaaggctattcgaccacgttttt

SEQ ID NO: 2272 - DNA, 200 bp, Lawsonia intracellularis
ctacagcagagccacgtcttctattaattacaacacgatattttttattaggagttattgaagaggcttgtaatcgtcttggtattcctcatcaaattattactattcaagatgaagaaacaggatgtgtagagtttgtagagcaacttttaacatcagttgccacgtttcaccctgactttattttaactataaatcat

SEQ ID NO: 2273 - DNA, 200 bp, Lawsonia intracellularis
tttggggtagataaagagggtattttagtagatcttcttgctaagctagagttaccaatggcttcttggtttgtggataatccacaccttattatccatgagtatggggaagttgtatcaccgtggacagctatttttacatgggatgaaaatacgttacattcattgaaagagtatggttatccacatgtgttttattt

SEQ ID NO: 2274 - DNA, 200 bp, Lawsonia intracellularis
accattagggacttctcaatatcgctttagacctagaatgccacaagataagcctttatcatcagtttttcctactcatctttcttttgttgggaactctatggtttataaggtagaagagcagatagagaaaggcaacttcccttcaatattgcttcaacactataaaaatatagctagtgattttatatattcagata

SEQ ID NO: 2275 - DNA, 200 bp, Lawsonia intracellularis
aacgttctatacaacaatttttaaaggaaacatatccagaatattataaagaatatcttaagcttcctgatgttgaacagcgtttagcttatgaagcaatgcttacatgggaatcaacactccaatatagattcagttgtgtagaacaattactttcttttcaacctgttattgttggagacaatggttggtatgaatta

SEQ ID NO: 2276 - DNA, 200 bp, Lawsonia intracellularis
cttagtaattataaagataattggagttattgtccgtctgtaaactattacaatacattaccatcaatatacagattttcagatattaattttaacagtacaagtaaacaaatgaaaggagcagtaaatcaacgtgtgtttgatattcctgcaacaggctcttttcttattacagactggcaacagcaaatggatacatt

SEQ ID NO: 2277 - DNA, 200 bp, Lawsonia intracellularis
atttgaacctaataaagaagttgtctattatcgtgaggttggtgagataagagagcttgttcagtattatttgacgcatcctaatcaacgtaagtctattgccagtgctgcaagacaaagagttcttgctgaacatacttgggagcataggctacaaacgttattagagcatatgcgtcaaacatatggataatatattc

SEQ ID NO: 2278 - DNA, 200 bp, Lawsonia intracellularis
ttattattaccatactacttgatagtatcttttattttatatacatatttcttttagccgaagtggtggaattggtagacacgctaggttcagggtctagtgagggttccctcatgggagttcaagtctccccttcggcaccatttaaatacaaggattaacaggctgtaaccctttttcttttttatcttcttaagggt

SEQ ID NO: 2279 - DNA, 200 bp, Lawsonia intracellularis
tcagagatggtgaaaaatttttgatggatccaaaggggtcccagcaggggggcaacttctccactagtaaaaggctagtcatgactaacccctttatttccttccaactttatgggaagatatcgaatttccactctcatgtatcctcctatctatctttatcagaagaggaatctctactaatttcaatatgtgcttcc

SEQ ID NO: 2280 - DNA, 200 bp, Lawsonia intracellularis
caaacacatactgaaattgcttggtggcacggaaatatggttcagtttgtgcaccacatatatccgtgaagcaaaaagactggtggataaacttcatgatgcattgtgtgctaatttgtaaggacaactgatgctgactctttaggaaattaaaaagcgcttagcgactcatgagtaatcttgccgattttcaagcggct

SEQ ID NO: 2281 - DNA, 200 bp, Lawsonia intracellularis
atgcttgaaaagatggagtagagcttgttctatgagaatgcgaatgatagtctatccgctaaggagttgtgttaaaagcagaaatctttgtaccagaacagaaggtgttaggaagctaatatgagaattggctgacaaagaaactcttcttctgtcttccattactataaatcaatataatgaacttttggacagaccat

SEQ ID NO: 2282 - DNA, 200 bp, Lawsonia intracellularis
tcaaataggagtatttttttgctttatacgttgaaagacatgcccggcttcttttccaaagaataagttgagtaacacaaggacgttattggcaaagctttaatgcaaacttgtcttatgtttaatgactatgttgtcgtggacgaagctgaaaacacccttaaaatatatttatagcaaacttatgggactgaactttg

SEQ ID NO: 2283 - DNA, 200 bp, Lawsonia intracellularis
tggagacaaaagttgctccagtggtttaactactggatatatagtttttttcagcattcctaagtatagcatggttcaaggtagtatcctgaccatactacaagatctggcttcgctcttgaaaagcctgcaacccctgatagaatatggtcaaatgactctggaaagacgcaaaaattagtacaaggttctgtagtcct

SEQ ID NO: 2284 - DNA, 200 bp, Lawsonia intracellularis
tgttcttaaccaaatgtaccatgtaagtggataaggaagtgagtactaaatcaggaggaaatggatagactggctctattttagatctttccggttattgaaagccatggattatggtgatatattacctttggaggatatgatggattctgtacaattaaacgagtgtattgcttttattcaacgtgctgaaaatctaa

SEQ ID NO: 2285 - DNA, 200 bp, Lawsonia intracellularis
aaaatacattacgcagtgcacatacatcgcaagggaggcaggaaagtgctgcagagcatagctggcggctttgtttactgatacttgtttttgcaaaatactttgaacatgctgatgtaaataaacttttgcgattggctgttgttcatgatttgggtgaagcagtttgtggagatatacctgctattgccaaaccggat

SEQ ID NO: 2286 - DNA, 200 bp, Lawsonia intracellularis
ttagacaaaaagtcggagactgaacgtagaggcatgtgtgaactgtgcacgggtttaccggaaagtatctatacggaaatgttggctttatgggatgaatatgaattagcggaaactctggaggcaaaaattgtcaaggggcttgataagctggaaacaatcatgcagcacaaccagggaaagaatccacctgattttga

SEQ ID NO: 2287 - DNA, 200 bp, Lawsonia intracellularis
ttatgaattcaacttgttttacggacaggatgctatatcagttcttcctctgcttaagcaaattcgagatgttcttgataagaacaccagggaaaatgttgctataaaaaactttttcaaacattacgatggtggactattataaaaattttctgaatgaagaataatgcatatctgtaaaagtcctcctaagacatttg

SEQ ID NO: 2288 - DNA, 200 bp, Lawsonia intracellularis
tccagaaggttttttgtttttgaggaactcatgaatctcaaagatattatttccctatccctggctgcgtttattcttgaccgcaagtaaagggtgtaggtctgctataaagtctcattagactatgacaaaatcctcttggtatggaaagatacagttataataagtgatttaataatgttatatatgtagtgttacta

SEQ ID NO: 2289 - DNA, 200 bp, Lawsonia intracellularis
attcattaattaaactacatagctttttttattcctatagacataagccaccagttcatagggtatgatgtaataaagccgcaaaacatacctatttgcatcataaaccaaaaagtaggatctgttggagacataggacctatgagtagaaatatagcaatggccatccagccatacatacctatttgccaggctgtaag

SEQ ID NO: 2290 - DNA, 200 bp, Lawsonia intracellularis
tgataaaaaatcaactctgaatgctctccaccataatgatagtccatgatgaagtgtcattgatgcaagtgctgcatattgaaaaaatactccaataataagcgctaatacatattctaatgcccattcaccatagagcatatttccaaatagtgtaaatggaagcaaacgaaatatccaaggtcctattagatctgcaa

SEQ ID NO: 2291 - DNA, 200 bp, Lawsonia intracellularis
tggtacacccagaaccacaatgcaatgttccttttataatatgtttccagttaagattatgttctgtagacgacatatccatgttttgcattatgtttttgtctaaaatattgacttcctgttgtcttgttatctcaagtgtatcctttcttttttttagtgatgtggcaatgttgtcttcatttgaattaaggacgttt

SEQ ID NO: 2292 - DNA, 200 bp, Lawsonia intracellularis
ctatggcttattacacggtaagcccagataccaaaaattccagcccataatgcagttattggccatacccatagcataattttcatttttgggacaggcctgccacattgatctactaagatatgtgcacaagataatagacaggtactcacatacagtttagaaaatagactcaatgattcataagaggttccatatat

SEQ ID NO: 2293 - DNA, 200 bp, Lawsonia intracellularis
catttctatatacctcctgtgcatactatttatctataacacaagcgattatatttatcttatctactttatataagtattaattaacataaaaaggtctatatcattggtcaatgactattctttttattgatattagaaattttgagataataaattaaatacccctgcttactatatgacagttgtttaggaaaaac

SEQ ID NO: 2294 - DNA, 200 bp, Lawsonia intracellularis
agtatttttatgaggataataacgtacagttaatagtagaatcattattttttcttttttaaccttaacaactagtattagttagtagatttttatagagataaattatagtaatattatttagtataacataatattattaaaataacatctactttataatccactttttatatgttccatatctttttctatgtctt

SEQ ID NO: 2295 - DNA, 200 bp, Lawsonia intracellularis
cttccataggaagttgactatggtttttcatataatttctttgagcttctttacgagctttcatatagttttgatctgctttttttatttcattctggtatgctttaagatctttatcgtgctgttcaagatatttttcagcatcagtatttttttcatctgttaaagaactcattgtttcttcgacattactttttaaa

SEQ ID NO: 2296 - DNA, 200 bp, Lawsonia intracellularis
tttgtatagccatctttaatactttgagtaattgatgtttcaacaacaaattgatctgaaaaattatgtgctacagctaaaggtatagtaaataaattaatggataatattccacttcttataattactgcatgtactttcatttttatcctccgtataattttattctaatagaattagaaaatatcttttgttttttc

SEQ ID NO: 2297 - DNA, 200 bp, Lawsonia intracellularis
tttaacgttattaaacagttgttttgtatttttactggcattgtgtattgttttttttgtagtatcagaagtattttctatatactttttggtgtgttctgcggaagtgtgtaattgttcttttactgaatcaatagtatatttaatttgtatgttaatatcacttaatgtttcttttgttttatcagaagctttttcta

SEQ ID NO: 2298 - DNA, 200 bp, Lawsonia intracellularis
tctgttcttttgtatgatcagatgtgtggtgtaattgttcttttagatggtcaaacgtctctttcatagcttcatttgcatgagaaataacttcttttgtctttttgataattttttctatattttctaatgcttgttctgaaatggtatgtagttgttctttaaaatgactagaatctatttcattattgtggtctcct

SEQ ID NO: 2299 - DNA, 200 bp, Lawsonia intracellularis
gtattattttttttaatgataatctcattattttcatgtttttcaggaagattattcatagtaacctccttacttaagttttttattttttagactttagtatgttagataaatttgctttattcacttaaaagtattaaaaattataataagatttttctaatacatttgatctaccgtatgatgaaaagcaagatttt

SEQ ID NO: 2300 - DNA, 200 bp, Lawsonia intracellularis
gatatgagattatcaagacgtgtaatgataatttttgaggttataatagaattaatatgttattattaaatgatagaagtagtttttattttattacgtataatttgggcttgaatagcagcttgattatatttttttagtagttcatagcgtcctgttttatttaaaatatattgtatcctttttaaggtacctaaaaa

SEQ ID NO: 2301 - DNA, 200 bp, Lawsonia intracellularis
gtttgatttattcaaaataaattttaagaggctatttatcttttgttgaaacagatgagaatcaatccctaatctattacatagagttataatatattttaactcatctatattaagtgatttacataaattaagttcttctatcattaaggttaatgccatagacacttcattatttttttcaagccaattgactaaaa

SEQ ID NO: 2302 - DNA, 200 bp, Lawsonia intracellularis
ggtgtctaccatgtttccaaaaaggttcttccttaagaagatcaaagcattgtaaggggttaaaaggagtagataaacttttgagcagatcatattgttttgatttatgaattgttggataaggccatagagaaggtgtaatatctactgtataaccatcttgttgtaagaagtaatccatatcgcctaggaaggaaata

SEQ ID NO: 2303 - DNA, 200 bp, Lawsonia intracellularis
ttgttcctcttgaaaaagagacttgtgttataagcttctttattctttcttccaggtgtttttgattctttatgtataacaacactttcaggaatacacatcatatatttcccctgttctgtgagtctaaggcataattctacatcttcaaggccatttttgtatccattaaagaatccaccaatatcaataaaattttt

SEQ ID NO: 2304 - DNA, 200 bp, Lawsonia intracellularis
tctatgtaaaagtaagcatgctgctgtgataattttgaactttcttttcttatgtactaaggggattgttgcaggaatagagttataaaggtgatttacatagtttccatctggagttatagtaacacctaaatgttgtactgtactatcaggataaataagtaaagatccaacgccagctagatatggatcagaatcaa

SEQ ID NO: 2305 - DNA, 200 bp, Lawsonia intracellularis
gtgcttctacaagaggtggaagccaaccatatgatacttctgtatcattattcaaaaagagaatatagtctgtatttgcagcataagctccagtgttacatgcaggaccaaagttatgattagtatcaaaagatatataatgaaagttagatccaaataatatatttcctaatgtagggcatgctagatttgtttcatct

SEQ ID NO: 2306 - DNA, 200 bp, Lawsonia intracellularis
gatgaaccattatttataacataaacatgaacgttgtttgtatatttagctaagcttattaaacaagtttttgttaattgccactcattatatactggaataataatactaacttttatcattttaatatgttagaaataattaggttataattaaaataagtgggttataattaattgaatatttaataacttaataat

SEQ ID NO: 2307 - DNA, 200 bp, Lawsonia intracellularis
cttttaaagttgaagtaatactactatatataatagagagtcacaatgataaaaataaattatattataatttatttttatcattattaataataagtttataactatgctgaatgtattatgaaatatgttgtttgtcttttatgtgtgatattattttattatttctgtagtgcagggacactatatgatctatgggg

SEQ ID NO: 2308 - DNA, 200 bp, Lawsonia intracellularis
tccttcactgtattcttctttcccttctgatagtcgaaatgctcttcctaatgatgcatcaatccctaaaaattatattcctatatgctcactaccaccccttttaaatacaattggcacaatccgtagagttgacgtaccaggtgataaaaaagttgtagctttaacttttgatatgtgtgaacttgctacaaaaacaa

SEQ ID NO: 2309 - DNA, 200 bp, Lawsonia intracellularis
caggttatgatacagctatcatcaattttttgcgtttacatcaaatcccagctacattgtttcttgggggtaaatggatgagaacccattctgaaagagctatgcagcttattgctgatcctctttttgaaatcggtaatcatgcatggactcatggtaattttgggattatgagtgaagcaaagatgaaagaacaagta

SEQ ID NO: 2310 - DNA, 200 bp, Lawsonia intracellularis
ttatggacacaggcacaatatgaaattttaagaaaacaagttattgagcgcatcaaattaaaaaattttctactacctactatccctgagtgtatgcaattatttcgtctaccatacggaagatgtacagggcaggccttaaaattacttgcagaactagggttttatgttatccaatgggatgttgttgctgaagttca

SEQ ID NO: 2311 - DNA, 200 bp, Lawsonia intracellularis
taacaataatagtatacagggattagagcagtatgttgtcaaaaatgtaaaaagtggttcaattattttatttcatgctaactgtgttcctattggttctgctgagttacttaaaaaaactgtagaattattgaaacgtcaaggataccagtttgttactgtaagcactttgcttacaatgggtaagcctcaatatacaa

SEQ ID NO: 2312 - DNA, 200 bp, Lawsonia intracellularis
tggatggttatttcacatcgcctggagataacctttcattagatacaaaatttggcattgatggaacaggattaaagtaatattctttaacatagctaataaggtacaagttaaaatttgtttatccttttattaagagaaaaaatagtattgcttaaatgcattggcagtttttttgttctagcgatattctaaagtta

SEQ ID NO: 2313 - DNA, 200 bp, Lawsonia intracellularis
gattgaattttctactttatatattattacagtaagttagatatataaagtttttcgttttagttgttaaacttgaattgctttttattataggcttaatttttaactaaattataaatgtaagtacaaatactaagactctgctataataatatataaaatctttatcagagtagtaccttagtatatatctatatatt

SEQ ID NO: 2314 - DNA, 200 bp, Lawsonia intracellularis
atcattctttatttttcaatctattcatttatttttcctttttatttataatacaacaataaaaaagctgagttatattatctataattattttttttaattattaggaaataaaaatgattacatattaaaaaaagagacgatagaattattccttttattgttgataaaattattcaatctacttttagacaacacat

SEQ ID NO: 2315 - DNA, 200 bp, Lawsonia intracellularis
ctttatcagaaacacatggatgattatatctatatataatttaataagaatcattttaggggatattgagactatgtttcttagtaatacttacttagaggttgaagcattacagaatatcatagaaaacttcttatagaagaaggactttaatttttacttgatacgtataaacagtatcataataagcgtacataaac

SEQ ID NO: 2316 - DNA, 200 bp, Lawsonia intracellularis
acgtaaaagaaaaagttactttatacaccttatgtatgattttacatttaaagatgttaagcatagtgagcttaaatatgaaaatgctaatttcagtacagatacaacaatagatattatgttgaagccagtagtgaaatgctaaaaatttttatgagttgtatgtatttaaaacacaatatagtattgcttataccaaa

SEQ ID NO: 2317 - DNA, 200 bp, Lawsonia intracellularis
gatgatatccatattcatgagttagattgtttaactttaacaaatgttgttagatagatataaaaaaacttttttctagtaattttaacataggttatggattcactcgtgaatcaaatgaaatacgtaattatagttcattaatacatattgtattacaagctttaaaatgatcaacatggtgggaaagtatattaaat

SEQ ID NO: 2318 - DNA, 200 bp, Lawsonia intracellularis
tttgattataggactggctctaagaatagctaagacgtttataaaacaaatttatgtaattcttgtaaataatctagaaactaaagatagtattacttcttaaaaagttatgttattcaaaataagtctatccttggagtagatggtctttttgtatatacaaacaattaaataatgttaacctactatttagataaaaa

SEQ ID NO: 2319 - DNA, 200 bp, Lawsonia intracellularis
gtgtattattactaatgcaatagaatatactgaaaaagaaacattccaggcaatggaagccctagtttataatttaaatacaatgcattcttgtgtaggagtccaaattctttatagctccattagccatggtacagacacaagctctgaagggcatatgattacttgaaatttttatttgctatagagtatgaattagg

SEQ ID NO: 2320 - DNA, 200 bp, Lawsonia intracellularis
aaatggtgaaactctaatatttctataaggatttttgaagtaaaagaagggattagtttcaatataaaagctctatatcataattctaacaaatggggacagttacatatgtggaggtaagatggagatattagaaataacttagaagcatttgaagatattattagagctatgaatgaaatatgagcagggtatggttt

SEQ ID NO: 2321 - DNA, 200 bp, Lawsonia intracellularis
attaactatcctgtagatagagattcctgtttggggttatctaatattattaatgatgtgtgtccacagtgtggtcgtcgtgaagttaaagtattgatttacatatagtaaaaatatgaaaaattgtttcaacacactataatatatatatatattaatatagatattcagagaaaaataaagcctacaggtagtaatat

SEQ ID NO: 2322 - DNA, 200 bp, Lawsonia intracellularis
atattatatagtaaaaaatgttcttgtttaatgtattattctcatatgtaacaatatattttatgagttataactgttggagaataaatatggaagtaaagcaacagaaaaaagtaaaaaaacttattggtgaaggtattaagtttgaaagaattagacgtattactagttatttattggtacagtagatcgttttaaca

SEQ ID NO: 2323 - DNA, 200 bp, Lawsonia intracellularis
atgttaaacaagcagaagtagttgatagagttaaatattctaaaataacttcttgctaaggttaatagtccctacaacccaaaaggtacgcatatccacctatcttgcgtaccttttactaatttttaacatatagatgaatacagtctattcagaatgttagctccttctaatataatcaggctttcaagtcttattga

SEQ ID NO: 2324 - DNA, 200 bp, Lawsonia intracellularis
agaatctgttgttgatggtcctagactaaggtatgttatttacacagaggcgtattcatgctgtccaggctgtcataatcatcaaccaatttataccaaggagaaaagcttgttaatattgatacaatttttagtgatattaaaaagaaacctcttatacatggtgttacttttagtggtggggaaccattttttcaaag

SEQ ID NO: 2325 - DNA, 200 bp, Lawsonia intracellularis
caactccttggcgaacttagcaaaacaatttaaggttataggatatctgttaagttatactggatttctttttgaagaacttcttacagataataactagttatcatttttgaaggtattagacgtaattattgatgggccttttgttttagaaaaaagctagctatactccactttcgtggatctcatagtcaacgagt

SEQ ID NO: 2326 - DNA, 200 bp, Lawsonia intracellularis
tattgatgtccactcatctctttttcagaataaaattatatcatgtccttagtgataataacttattatctagattagtttattaataaacacgtaattgtatcatattacctttaagagcatcttgctctttctttatagttaggctaaggactcacttggtaggagaggtagcgaagtggctgtaacgcgctcgactc

SEQ ID NO: 2327 - DNA, 200 bp, Lawsonia intracellularis
gaaatcgagttatcgatggtaagtcgatacgtgggttcaaatcccaccctctccgccagtatttaattaggatttctattttttattcctaacatatagaaatcattttttgctatattgattatgattgaaagttcataaaagtatataatttttcaagtcgcatgataacgggattattttcctatattatagtcacc

SEQ ID NO: 2328 - DNA, 200 bp, Lawsonia intracellularis
tagtaaatttatattagggtgaagtatattttaatgactagaatttttgaaactctaatatatagcttattaagctgtattattcattaagtccattttactttctttataattttatgacttagtctatacttgaaagattcttagactactaacagtttttatatagaatagtattaggtataggatttatataataa

SEQ ID NO: 2329 - DNA, 200 bp, Lawsonia intracellularis
gtcctatactgttaacacatatatttttatgtagggagcttgttgtataaagcaaagaaggaattttttataagtataatatattaacactaaccagctataatgattgaaattttattaaacttattttaacaacatttataacatattgaaagttcatactaaattttgaacttatacaataaattataacttagtat

SEQ ID NO: 2330 - DNA, 200 bp, Lawsonia intracellularis
aaggatgatagatatgttgtttagtttattatattctggttatggagaagctaaatgtatatatatatatagtacttttaatattttttccatctattttattggcaaaagagtttgatggggaaaaaatttttttcatgaaaaatcagtctccacaacaacaaatactttcaattgcacttttaaccaaaaacaaaaaa

SEQ ID NO: 2331 - DNA, 200 bp, Lawsonia intracellularis
attattatatttgacggtggtacaaaagcagatagtaaccatctttcttcttttattaatgagcatggaggaaaagtatcagcttggtttttaacacatttacatgatgatcacacaggtgcactttcagaaattcttcttgatgataacataacaatcgataatatatactacaatttcccacctccagaatgggttga

SEQ ID NO: 2332 - DNA, 200 bp, Lawsonia intracellularis
agagcatgaacccatgtactcatcgcatcttactatgatagtagagcctttaaagaaaatggcttatttaaataatcaaaagaagatacaaaaaggtgatacattttcgatagatggtgttacaatcactgttctcaatgattttgatctttcaataactagaaatggtgtaaataatacatcatttgtatatgatgtaa

SEQ ID NO: 2333 - DNA, 200 bp, Lawsonia intracellularis
tgattgcagggaaacgtatgttggttttaggagacttaggtgaagaaggtggagaacggcttttagctgagtatggaaacacattgaaagcagacattgttcaaatgtcacaccatggacaacgaggtgtacaaaaagaggtatatactgcaattagtcctagaatttgtttatggccaacaccattatttttgtgggag

SEQ ID NO: 2334 - DNA, 200 bp, Lawsonia intracellularis
aatgactgtagttatggtcctagttctgggacatgggaaataaataaggttaaaacatggatggaagaggtaggtgttagagtacactatgtttctgggttacaagaagatgatatcgttattgaatagattactaggttatgctaatttgttgaacaagataggattagtattctatagcaataatacagtactgacta

SEQ ID NO: 2335 - DNA, 200 bp, Lawsonia intracellularis
ttctttttagttaaataactatactacatctaccataaaaaaagactatttataggaaagttgataatctgataaaatgagtagatacatttatagaattagaaaggggtatttctatgcatgaaacgtttcttataacactaggcacaatattatatagtcttgctgcatttgggtgtgctatttattttacatatcgt

SEQ ID NO: 2336 - DNA, 200 bp, Lawsonia intracellularis
gacaaaaatactacagctattatagggttccttgtattaagtttaggactattgttgataaacaagttagctgggaatatttcagaagttcagattggtaactttacccttcgtgctgaacaggtaatagataacttagaaaataaagctaatcatataattgataaaatgaatgatagttgtgatgaaataataaaaaa

SEQ ID NO: 2337 - DNA, 200 bp, Lawsonia intracellularis
gatagaaaaaactttagataataagaaataataaagttagcagagagaataaaaatctatatgaaaataggagatagatagattaccaaataaaatttttagatagattattatagtaagtaaaagcaactagttatgcagttaatctaaaaaaataagaatagttagacaatgtattgatattgtatagaaacattttc

SEQ ID NO: 2338 - DNA, 200 bp, Lawsonia intracellularis
attactaaaaaataactagtaattttttagtaaaagtagatgagcacacacacacacacacacattaagcaagtccctgacgcatcgtattatcaaggacttgcttcttttgtgtgtgcataaactatgtttttattaactctatagtactataagtatcttgcatttttaatagaagattttcagtacgttttagctgc

SEQ ID NO: 2339 - DNA, 200 bp, Lawsonia intracellularis
tctgtaagaagatgaaggacatttccctccactgtggcttcagaatctacaatttataaaagcgatgtaaaagtagagatagatgtacaagcattaaagaggagtcctttaaaatcagttacattttctcctttgaggagcttttgttcacaggtaacagcaagagaaggaaagtagtagcaacgagtttcactagggat

SEQ ID NO: 2340 - DNA, 200 bp, Lawsonia intracellularis
atcatcattatcatacataacatatgtatgttttgtatggctttcttgtttttttgtttctttattaggtatagataaatctatatttgaagaagaatctgataatgtttttacagcttcctttacttgatgttttaccatttctaaatcttgtgttgctttatggagtgtaatggtaagttctgttagatctgaatgaa

SEQ ID NO: 2341 - DNA, 200 bp, Lawsonia intracellularis
gttttaatggtatatatgtgtcgtgttgtatagtgtttaataatatatctggcataattgtatctccttagcatggaaaacctacttatatataaaggtgtaaaagctgcctctctatcaggagggccaaccgccaaggataaagatgttctgaggcatctaatatagaagtacctaaccaaagagtaatggataagtca

SEQ ID NO: 2342 - DNA, 200 bp, Lawsonia intracellularis
agtaagaaaaaatataatatagtataaagttagttacatataaagaatataaagaagatgtagttctatttttttagatgtattaaacagtgctatatttattggaaatacaaagcattatatctttttcattatataaaagacatagctgtaatcatctgaattttctttatataaatcgatttcggattgtattagtg

SEQ ID NO: 2343 - DNA, 200 bp, Lawsonia intracellularis
ctataacttgttgagctttttcatcattattataggtagtcttcattctttcaagatttttttggagaggagcatagtaattttctttccaattacttttaggtaaaacaaaatgtcctaagactttatagcctgcagattgaattttttgtaagttgttctcgattgtatcgatttcagggtaagcttcattccaaaaa

SEQ ID NO: 2344 - DNA, 200 bp, Lawsonia intracellularis
tacttacttgcatctgagtattgatctattaaccagcttatttcagagcaaacaaagtatccgttattttttagaaattttttccagtcttttaaaccagtttgaaatcctgcaatatatattgaaccttctgaccagataagatcaaagctttctggctcaaagtccatttcaaacattgacatcacttttggcttgat

SEQ ID NO: 2345 - DNA, 200 bp, Lawsonia intracellularis
attgtttgtagctttgctttccagttcattgatatattgttggttattatcaatagctattatttcagcattactaaaatgcttagctagtaaaagagtactttcaccaactccacaaccaatatcaagaatctttttaggtaaaaagtcagcaggtaaaagtttaatagcttgttgagtactttcagtacttcctggag

SEQ ID NO: 2346 - DNA, 200 bp, Lawsonia intracellularis
caagcctgtttaatccatcaaatgcttcaaaaagatattttttcatgccttaattgtagacaatgctagattttaaaacaattatattttgaattattctaattggagctccttttatcatttgtacctatattactagtcattaggttacatttgttagcctacctttaaaactatttgtattaattatttttcattgt

SEQ ID NO: 2347 - DNA, 200 bp, Lawsonia intracellularis
tgttttaatcttatgtttcacattaattaaataaaaaaatgtcccccaattaaggaggacacatatactatttttaaattgtctataagataattaataatactatggatagataataactagataaaaaaatgaatcaaatgaagtaaaggtggcgtccccaaggggatttgaacccctgttgacggcgtgaaaggccg

SEQ ID NO: 2348 - DNA, 200 bp, Lawsonia intracellularis
ctgtcctgggccgactagacgatggggacgcatcagcaagttgtcttaatacaagcatgcttctactgaacttgctaaattgagtcaagctttttttgataattctgtgtagcttttctatatgttatctattattataaattaattacaataatttatataggttatatcttttttcttttttatggtttttcttgcag

SEQ ID NO: 2349 - DNA, 200 bp, Lawsonia intracellularis
tataagtgaaatatctatatggtatatagattgtataggaacatattgtagtttttacctgattattttttatgaaggatatcttgcttgagtaataatataacaaataataatcttagaaatatagctattatagcacatgttgaccatggaaaaacaactttagttgatgccttatttcgtcaaagtggtatttttcg

SEQ ID NO: 2350 - DNA, 200 bp, Lawsonia intracellularis
cgaagatcagcaagttgatgatcgtgtcatggatagaatggatcttgaacgtgaaagaggtattaccattgcagctaagaactgtgctgtgacatggcaaggtataaaaattaatatcatagatacaccaggccatgctgactttggtggtgaagtagaacgtgcactttcaatggctgatggtgcaattttacttgtag

SEQ ID NO: 2351 - DNA, 200 bp, Lawsonia intracellularis
atgcagcagaaggtccacttcctcaaacacgttttgtgttaaaaaaaacacttgaagctggattaaagattattgttataatcaataaaattgatcgaaaagatgcacgagttcaagaagtccttaatgaaatttatgatctttttatagaccttgatgcaacagatgaacagttagaatttcctgtattgtacgctatt

SEQ ID NO: 2352 - DNA, 200 bp, Lawsonia intracellularis
ggtagaaatggtgtggcaatgagaactttggatgatgcacaagaaggccttgttccactttttgagactataatagaagttgttccaggacctaaatacgatcctaatgaaccattccaaatgcttgtttcagatttgagctattcagactatcttggacgtttatctgttggaaagatatctcatggaagtgtacattc

SEQ ID NO: 2353 - DNA, 200 bp, Lawsonia intracellularis
aaaagatgcacttgtttgcatgaatgaagagggtgtagctattcctcttcgagtaacaaaattacaatcatatcagggaataacacttacagatatagaatctgcagaacctggggatattattgttattgcaggtcttgaagatgtttctattggagatactatttgtactaaaaatgaaatacgagttctaccaaggt

SEQ ID NO: 2354 - DNA, 200 bp, Lawsonia intracellularis
taaatattgatgaaccaacagtagctatgcgttttactattaataattctccattagtaggaaaagaggggaagattgttcagtcaagaaaaatcagggaaagactttttaaagaaacactaactaatcttgctattagtgtagaagaagctgaagaacgtgatagttttattgtaaaaggacgtggtgaatttcaatta

SEQ ID NO: 2355 - DNA, 200 bp, Lawsonia intracellularis
gcaattctcattgaaacaatgcgtcgtgaaggttttgagttatctgttggtagaccagaagttattctccaagaaaaagatggtgaacgacttgaacctgttgagcatttgtatattgattgtgatgaatcctttatgggagtagtaacagaaaaaattgctcaaagaaaaggacggatgttaaactgtgttaataatgg

SEQ ID NO: 2356 - DNA, 200 bp, Lawsonia intracellularis
ctcaggtcgtgtaaggcttgagttttcaataccatcaaggggtcttattggatatcgtgatgaatttcttactgatacaaaaggtacaggaattatgaattcgttattatcaggatatgagccctggagaggagattttcctagtcgttttacaggttctattgtttcagatagggcaggttcagctgttgcatatgcat

SEQ ID NO: 2357 - DNA, 200 bp, Lawsonia intracellularis
tatttaatcttgaaccaagaggtgaattatttattgtttcaggagatcctgtctatgaaggaatgattataggtgagcataatcgtgataatgatatagatgttaatcctataaaagagaaaaagttaactaacttacgtacatcaagcaaagatgaagctattattcttactccagtaaaacctatgactcttgaaaaa

SEQ ID NO: 2358 - DNA, 200 bp, Lawsonia intracellularis
gcattacattttgtaaaggaagatgaactagttgaagtaacaccaatttcgattcgtctaagaaaagcagaattaagtgctcaaaagagacatcaaatagcaggaaaaaagaaaacaggaaagtaaagacatattctttttctaagaaatatgtcttattgttgtagtattattttttgttagacgttgaataaaaagtg

SEQ ID NO: 2359 - DNA, 200 bp, Lawsonia intracellularis
aataatatcaccatcagtaacaatataatccttaccttctgttcttaacactccagcattacgacaggctgtttcagatttgtattgtagaaaatccgaaatactcatgacttctgcacgaataaatcctctttcaaagtctgaatgaataacccctgcagcctgaggtgctttccaacctttttcaattgtccatgctc

SEQ ID NO: 2360 - DNA, 200 bp, Lawsonia intracellularis
ttacttctttttctcctgctgtgaaataactaataagacctagtgcattgtagccggtttgaataatttgaatgagtccactttctttgatatgataactattaagaatttcagcttgttcttcatctgataatccttgaagttcttcttctatttttgcacaaatgacaatcatctctgtatggttcttttctgcaatt

SEQ ID NO: 2361 - DNA, 200 bp, Lawsonia intracellularis
ttttttactgaatttagatagttattaccgtcaattaaattagtttcatctacattagcacagtatataatacgtttatcagttagtaagcctaactctttccataatgaacttaatttttcattttttttctcattaaatgtagatgcagggtttccactatttaagtgaagaagaagaagattcatttcttcaacagc

SEQ ID NO: 2362 - DNA, 200 bp, Lawsonia intracellularis
cactttagcgtctttattattttttgctattttttgaaggcgctctatacgttgtgtcacagtttgtatatctgctaataagagttctgtttcaatggtttcaatatctctgatggggtcaacatttccttcaacatgtgttatgttttcattatcaaaacaacgtacgacttgaagaataacagagcattcacgtatat

SEQ ID NO: 2363 - DNA, 200 bp, Lawsonia intracellularis
gggccaaaaattgatttccaagtccttcacctttacttgcaccttttactagccctgctatatcaataaagtctacagttgtttgaataaccttttgaggagaaactatagatgctatttcttcaaggcggtgatcaggaacaggtacagtggctttgttaggttcaatagtacaaaatggatagtttgctgcttgagca

SEQ ID NO: 2364 - DNA, 200 bp, Lawsonia intracellularis
ttttgtgcttttgttaacgcattaaataaggtagattttcctacattaggaagacctacaataccaatttgtaaagacatagtttatctccaaacgatttatactattaactatgatttgttaattagtacaaagaaaataatatgttttgtacaaatataataagctatattacagcaataagatagtaaaaaataatt

SEQ ID NO: 2365 - DNA, 200 bp, Lawsonia intracellularis
tgactttacttataataagatagctaagtaattagaatttttattttattattatctatggttagagaaaaaattgttatgtttattttttgttaaaagatatgttaatatttagttaccataaagaaattattgatagttaggaggtgttatgcagcgttgtggtctttatatcatttgtttagtgttatctataggta

SEQ ID NO: 2366 - DNA, 200 bp, Lawsonia intracellularis
tgataagttgtgcaaattttagtgcttcttcttttggagggaagcaaattcgtagtgcacatattgttgaatttggaaaagtcgtttctgtaaaacctgttgaactagaaggaaatacaccaattctaggtactattactggtggagctgttggtggtgttcttggtagtttaatcggtggaggatcaggaagaatatta

SEQ ID NO: 2367 - DNA, 200 bp, Lawsonia intracellularis
tcaactgttgttggtgctggagcaggggctgttgctggaaacattgctgaaagaaaaattacaacgcaacaaggtctcgaaatagaagtgaaacttgataatggtcaaattatttctatagttcaaggtgctgatcaatcttttagtcctggcgaacgtgttcgagtactacgtggaagtgatggttcggctcgagtatc

SEQ ID NO: 2368 - DNA, 200 bp, Lawsonia intracellularis
ttcaatatagagaacaaaagtattaagtgaaaaagacaaaatttgttaaataaaaaaacttgttactattaagtaacaagtttttttataaaaagaataacttttttatgatgttggttgttttgtttgttttttcttagtaacaacaggaattgtttcgctaaaagctaatggaagaacttcatctatatggcttacag

SEQ ID NO: 2369 - DNA, 200 bp, Lawsonia intracellularis
tatgtattttaatctttttctttaattcttgaggaatttcttccagatcttttgtatttttagtaggtataataacatgtccaagacctcttgcaacacctgcaagaactttttcttttatacctccaacaggaaggactcgaccacggagggtaatttcacctgtcatacataaatctccacggacagatttacctgtt

SEQ ID NO: 2370 - DNA, 200 bp, Lawsonia intracellularis
aatgcagaaataagtgctgttgttaatgttacaccagctgatgggccatcttttggagttgcacctgcagggatatgtatatgtatatccattgatttagcaaaatctggtgagatattaagactagatgcttttgaacgagcataacttaatgctgcttgagcactttctttcataacatcaccaagttgacctgtaag

SEQ ID NO: 2371 - DNA, 200 bp, Lawsonia intracellularis
aagtaagtttccttttccttttactgtagatacttctatatataaaatttctcctcctgctggtgtccaggcaagtcctaaggcaacacctggtggaagtgttttttctgtgtcatcatcaataaatcttggtattcctaaaaatttttcaatttggtttgtagtaatacggaatggtggttttttcccttcagcttttt

SEQ ID NO: 2372 - DNA, 200 bp, Lawsonia intracellularis
ttcttgcaaccttacggcatagagaacctatttctctttccatatttcttaatcctgcttcacgagtatattctctaataattttttcaaggcaggtgtcagaaatgataagctcgttttcttttagtccattttcttttaattgtttgggtagaatatacttacgagctatagcaagtttttcctgttgggtatagcca

SEQ ID NO: 2373 - DNA, 200 bp, Lawsonia intracellularis
ggtaatgatatgatttctaatctatcctttagtgctgcaggaatatgttctaagtgatttgctgtgcataaaaaaaggacttttgataaatcaaatggtacattgaggtagtgatcactaaagttatggttttgctctggatctaatgcttcaagtaatgcagaagatggatctccacgaaaatcattccctagtttatc

SEQ ID NO: 2374 - DNA, 200 bp, Lawsonia intracellularis
tatttcatccaagagaataacaggatttttagttcctgcttgtttcatagcttgaataagccttcctggcattgcaccaatatatgtgcgtctatggccacgaatttcagcttcatcatgcataccaccaagagagatcctttgaaattttcttccaagtgacttagcaatagagcgtccaagtgacgttttacctacac

SEQ ID NO: 2375 - DNA, 200 bp, Lawsonia intracellularis
caggaggtcctgcgaaacaaagaataggaccttttgactttggattaagttttcgtacactgagatattcaagaatacgatctttgatttttacaagtccatagtgatcttcatttaagattgtttttgctttatgaatatctagttggtctttggatgtttttttccatggaagctcagcaatccaatcaagataggta

SEQ ID NO: 2376 - DNA, 200 bp, Lawsonia intracellularis
cgaattacaccagcttctgctgaatcggcatgcattgttgaaagcctacgaagctgtttatcgacttctttacgtacttctgctggtaatccagctttgtttaaggcactagaaacttcttcaatttcttcatcagcatcaatagcatcacctagttctttacggatagctttaagttgctctcttagaaagtagtcttt

SEQ ID NO: 2377 - DNA, 200 bp, Lawsonia intracellularis
ttgagctttatccataccttcacgagcagaagtttggatttttacttgcattgttgcaacttcagcttcatgggtaaggtgtgtaatgacaaggtgaagtcgatctataggttcaagacattgaagtatttcttgtgcttcttctgttttgagtcgaagattggctgcaattagatctgcaagtcttcctggttcattca

SEQ ID NO: 2378 - DNA, 200 bp, Lawsonia intracellularis
cattagaaagaactcccataatttcgccagtaggaatacctcttaatgctagtattttttcgcattgttcacgagcataacggagaagagcttcctgttctgttggctttacggtaggttgaggttcttggagtaactcaactgttgctgtaagatagccatcttcattatggatcgtaagacacctagctctagagata

SEQ ID NO: 2379 - DNA, 200 bp, Lawsonia intracellularis
ccttgtacaagagcttttagacgtccatcaggcattttaagaagacgaagaataagagcaacagttcctacggaatagagatcttcttctgtaggattttctatttgtgaatctttttgggcacagagaaaaatatgttgtccatgtgtagtagcagattcaacagcttgaatagaacgttctcttcccacaaataaagg

SEQ ID NO: 2380 - DNA, 200 bp, Lawsonia intracellularis
aacaatcatatagttaaatacaacaacatctcttaggggcaaaatagggatactcgatggaatttcttgtggctgaacatcatcttctgtcccagcatttattttcatcgccccctcctcttgctgttgttctgtttcttgattgtatggtgcaagagaatttttggcaatactatcatcatttgtatcaaaagtcataa

SEQ ID NO: 2381 - DNA, 200 bp, Lawsonia intracellularis
tatattcctaagtatacgggattatacttttggttttacagtaacccatcatttcggatactgtaacaatttttttctgtcacaataatatgatcaattaaccgtaagtttatactttgtgcaatatgttctaagtggcgtgtaatttctatatcaaaacttgatgcatttgaagagcccccaggatgattatgtactaa

SEQ ID NO: 2382 - DNA, 200 bp, Lawsonia intracellularis
tataaacccacttgctttcctttttaagactatttctattgtatctcttggatatagaggtgaactccctatggttcctttacttaacctttcccagcttataagtctgttttgtgtatcaacagttgcaatccatacttcttcatgaggacaacctgtaaatcttgctttagctatttctgctacaattttaggtgtac

SEQ ID NO: 2383 - DNA, 200 bp, Lawsonia intracellularis
ataattgaattttttctctcacaggtgtttcagcataacgtgcaaaaatttcacgtataagtttccaaaatgcacttagagcttcaccgaattgaggaatagtttcaagttcacctgggaatgcatcaagtgcacctcttattgagccaaattgttgtaataattttttagccaatggctttgtgtccttgcgtaaatgt

SEQ ID NO: 2384 - DNA, 200 bp, Lawsonia intracellularis
acatatcctaaaaataattctaaaagttcatattctgccatctcagatgggtcattacataaccgttttctgagtctagctcgatgaccaaggtgatgaggcttgtcatttggcataaattagctagtccttgtatctcaagggaaaataacactatatcctataagccctcttgtcgtctatagaagattgggcattat

SEQ ID NO: 2385 - DNA, 200 bp, Lawsonia intracellularis
ctgctgatatctatgatgtttcttgagccttggtaaaaagtggtaacagtgtagaaataagtgtttcaagtgcctgtatggaagaaccttctcctgatttaactgtaacctcagcaaaataaagggcatcccacatttttgttattccttttattccaatatattttgcaagttgtgtttttttagataattcgtttgga

SEQ ID NO: 2386 - DNA, 200 bp, Lawsonia intracellularis
taacctgttacagtttctcccataagtagttgccataatgttttggcttctctttgtagcatagtaagaataaaaaagagtggatcttcttctttttgttgttcatgtaagatagatgtccatacttgtaatgcattacctgattcaagctgttttaagaatataaaaatatcaaatgtatttgctgtatgactgattac

SEQ ID NO: 2387 - DNA, 200 bp, Lawsonia intracellularis
atttaattgttgagtagagataggtaagctatcagaatgagatagcttaatttttaaaagttcagactttatagttgcagcatcagtaggtaaaagatttgaaagtgtttctaatgtatggggttcaaacgtaagtcctatgcttgtagcttgtgtttttataaattgttttaaattgcgttcatcaacaccaggagagc

SEQ ID NO: 2388 - DNA, 200 bp, Lawsonia intracellularis
tccatatccatttttgtttttgtgcaaaaataaaacatggaagtttttggatatgagcaggaagtttaggttgtcttttttcccatggagcttctaaacaaaatataagccatagatattggtttggtttgctaataattgatgaaatatttttccatatatcaacaggaagaaggtgtgcgtttcggaggacaactatt

SEQ ID NO: 2389 - DNA, 200 bp, Lawsonia intracellularis
tgtttatttgtaaaaagattttgtaatgtaaggttgtcccaaaatttttttggtaattcttcatctccccagtacacagatttttcccacttatttgacacatattgagcagtaactagttcctctaattgctgttgaagaattgtactatctggacatatacagaatatgaatccttgatgaatcataagataagtgaa

SEQ ID NO: 2390 - DNA, 200 bp, Lawsonia intracellularis
attaaagattaaaaaggttgttgaatttgatctattgctcttcgtgttgtcatgaatatgacttcttgaatagcttgttcttcattagcatgttcatagttttcactataaattacaggtcctgaactccaaatttctgtattagtttttccgtcaaaaataatgagctccatattgacagttgctgtaaatagtaagtt

SEQ ID NO: 2391 - DNA, 200 bp, Lawsonia intracellularis
atgttgtttatattctccagcacttcttatttgaaatgagtttatacgtacagtaagagtgaagtctgaaggtccagagtcaacccaaatagcaagctttcgtgcattaatatcattacgaacttgtgttcgtatcatataaggaagccatgggtagagtgtcgattgttcgatattgttcatacaaagagtttttgttc

SEQ ID NO: 2392 - DNA, 200 bp, Lawsonia intracellularis
catcaccaagaatagtgcgtttagaaaggtatccttcttgcccttgccaagtgtacccacaaccagttaaaaatattgatatataaaaccataaggggatacaataaaaagtagttgtaatttttttgttatacattgagctactcttatgttgtaactatatttatgattttgtttggaataataatatgtttttgaat

SEQ ID NO: 2393 - DNA, 200 bp, Lawsonia intracellularis
cgtttttccttcaaggtattgagtaatctttgtatcattaaaaataatgtgttctaattcttctttggagagatccattggtacttcaaatttatttcgaactttcccatttatttgaacaactattgttacaacatcttttaaaagggcctggggatcccattttggccaaggttctaaactaatagacgttgagtgcc

SEQ ID NO: 2394 - DNA, 200 bp, Lawsonia intracellularis
ctaaataactccataattcttcacaaatatgaggagtcattggtgataataaagtaagcacagttgctatagcagatgaaagtatatttttcccttcaactgtaagaataagttcattttttgagagataaagcgtatttacaaactccattattgaagcaatagctgtattaaattggtatttgttttctatatcttca

SEQ ID NO: 2395 - DNA, 200 bp, Lawsonia intracellularis
ctaactttttttatggttatatgttcttttctttttacatcttttgtaagggcagtagttgtttctataactgttgagttaccagcatgtgttgtatgtatgtgtggttgtacatcaataaaaagtctccaaactctatgcagaaatctataagaaccttcaatccctgagtcactccagtcaaagtctctttcaggagg

SEQ ID NO: 2396 - DNA, 200 bp, Lawsonia intracellularis
ggcagcaaataaacaaaaaagacgtatagtatcagcgccatatatatttatcatttgatttggatcaactatattccctttagattttgacatcttagaaccatcttttataaccattccttgagtaagtaattttgcaaatggttcatttatattggagggtaagtaacctaaatctctaagaagttttgtgaaaaaac

SEQ ID NO: 2397 - DNA, 200 bp, Lawsonia intracellularis
gagaatatagtagatgaagaatagcatgttcaacgccaccaatatattggtctacattgagccaatattttgctattgatgtatcaaatggttgttttgtatttttaggatctacaaaacgagcaaagtaccatgatgaatcaacaaacgtatccatagtgtctgtttctcttttggcaattccaccacattgagggcac

SEQ ID NO: 2398 - DNA, 200 bp, Lawsonia intracellularis
atacaatctatgaagcttgactcttgaggtaatggggagcttccatcttcattaatggtaatattagtgggaaggataacaggtaattcgtttttaggaacagaaacaacaccacagtttttacagtatataatagggataggtgttccccaataacgttgtcgagagatattccaatctcgtaatctccaagaaacaac

SEQ ID NO: 2399 - DNA, 200 bp, Lawsonia intracellularis
ccttgttgctttacctatcttttcaagatattgagtaattttttcttttgcttctttgttagtaagacctgtaaattgccctgaatgtataagcgttcctaaaccagtccatggttcaactattgtatgttcatttatttgaagttcatctggctgtataacaatagaaatgggtagattatattttttacaaaaatcaa

SEQ ID NO: 2400 - DNA, 200 bp, Lawsonia intracellularis
aatcacgttgatcatgggctggtacagccataatagctcctgtaccatagtctgctaatacaaaattaccaatccagatgggtattttatctccagaacaaggattgatacaataacgatcaataaaaataccttcttttgtgagtagattagattgacgttctaatctatccatatttctcattttttcgataacatta

SEQ ID NO: 2401 - DNA, 200 bp, Lawsonia intracellularis
tatagtttttctttttgcggagtatcattaagtaaggtttctaatataggatgttctggagcaagaataatagctgttgctccaaaaattgtatcaggtcgtgttgtgaaaatagtaatgaagtcttgagaggattcaataggaaaagaaatttctacacctgtggatttcccaagccaattttcttgcatagttataac

SEQ ID NO: 2402 - DNA, 200 bp, Lawsonia intracellularis
acgatctggccaggaatatttaagagttgtaagatcatctaatagctcttcagcataatctgtaatttttaaaaaccattgtgttagttctttttgaataatagatgtatcacatctccagcaacttccttcaataacttgttcatttgctagtacagtattgcaagatggacaccagttctgaggagctttttttcgat

SEQ ID NO: 2403 - DNA, 200 bp, Lawsonia intracellularis
aaactagtcctttttcaaagcagtcaacaaaaaaaagttgttcccattgataatagtcaggatcacatgttgctatttctctttgccagtcatatgaataccctaatcttttcagttgggcacgcatttcattaatatttgtatacgtccaatctgcaggttgtgtatgatgttttattgcagcaagttctgctggaaga

SEQ ID NO: 2404 - DNA, 200 bp, Lawsonia intracellularis
ccaaaagcatcccatcccatagggtgaaggacattatatccttgcattcttttaatacgggcaataacatcacctatagaataatttctgacatgtcccatatgaatgtttccagaagggtaaggccacatttcaagtacataatatttttttttattaggatctatgtcacaagcataggcgtgttgttcttcccagta

SEQ ID NO: 2405 - DNA, 200 bp, Lawsonia intracellularis
acgctgccatttcttttcaataatgttaggatcataattagaatgcattatcatagagtttatcttaatttttatctatatagttgattttttctgtttcaatagcttttattatagcgtctaaaataccatttataaactttctagctttttcgtctccaaaacaagtagctagttctaatgcttcgttaagagatact

SEQ ID NO: 2406 - DNA, 200 bp, Lawsonia intracellularis
ttaggaggaacgtctggacaataatacatttcaaatgtagcaatacgtagtaatgttaattctatcttacctaatcgatcgactcgccaattttgagaaaattgacttattattttgtcaagtctagttacattacgccagactccctcaacaagttgccaagaaaaacttatttgtgtatctaattcagttattatacc

SEQ ID NO: 2407 - DNA, 200 bp, Lawsonia intracellularis
agtatttctttcttctaatgggttaggtagattaagaaagatttctttgagggtttcaattgtatttatttgagtaaaatggagactataaagaacttgaaaagctttagttcggtctattcgtctagaatgttttttattagcaggcattttttttgcctatgaaattttttggatcacacggatactttcaaggacag

SEQ ID NO: 2408 - DNA, 200 bp, Lawsonia intracellularis
ctaatgtagcatctgatcctttattcccagcttttgagccagcacgttcaatagcttgttcaatagtatctgtagtaagaacaccaaaacctatagggacgtctgtttggagtgaaacattgactacacctttagtagcttcactagcaacatagtcaaaatgaggtgttgaaccacgtataatggcacctaaaataatg

SEQ ID NO: 2409 - DNA, 200 bp, Lawsonia intracellularis
ataccatcaaattttgatgttaatgaaagttttttacatacaagaggtagttccattgctcctgcgacacgaacaattgtaatattttcttttgttcctccatggcgtagaatacaatcaatagatccagaaataagacgatcaacaacaaagtcattaaatctacttgcaagaatagcaaaccgaagtcctgaagcatc

SEQ ID NO: 2410 - DNA, 200 bp, Lawsonia intracellularis
ataatgtccttctattacatttagttgtcccatttcattctcctttattaaagttagttataataagccatactataattatctgttaaacttttttatgaagaattgatagtaacaggttaactcctttgacatgttgtacatagatgtaataagtgtcctaatttttcttgttttgtacgtagatatgataagttagt

SEQ ID NO: 2411 - DNA, 200 bp, Lawsonia intracellularis
cctagaacttgctatttcaagtggaacacgttcagtaatatgtattccatatccttcaagtccaataacttttcgaggattatttgtgagtatacgcatacgcttaatacctaaatctacaagtatttgggctccaactccataatctctaaggtctggtttaaaccctaatttttgattagcttcaactgtatcatatc

SEQ ID NO: 2412 - DNA, 200 bp, Lawsonia intracellularis
ctttatcttgaagagcataggccttaattttattagcaagtccaattcctcggccttcttgcctcatatatacaaggacacctcgaccttcacgttcaatttgtcttaatgctgcagaaagttgtccaccacagtcacacctaagagagtctaaaacgtctcctgtaaggcattcactatgtactcttactaatacagga

SEQ ID NO: 2413 - DNA, 200 bp, Lawsonia intracellularis
ctatcatcctctgtattgttaacattaccttttattatagcaagatgagtgtctgaattaatgccattttcataagcaatcacttcaaatgtaccaaattttgaaggtaagttagctctagcaacctgctttacagtaagcttaccaagcttcatcttataacgaattatatcgctaatagtagttatttttaagttata

SEQ ID NO: 2414 - DNA, 200 bp, Lawsonia intracellularis
cttagatgcaaagatttctaaatcagacatacgagccattgaaccatcatcattaagtatttcacaaataatagctgctggctttaaacctgcaaattgtactagatctacacttccttctgtatggcctgctcgagtaaggacaccaccaggttgagcgcgtagtggaaacatatgacctggagtgacaatatcttcag

SEQ ID NO: 2415 - DNA, 200 bp, Lawsonia intracellularis
gttgtacgttatcatcaatagcagtcaatgcagtatgtgctctatcagctgctgagatacctgttgttactccttgtcgtgcttctattgatacagtaaaatttgtaccaaactttgaattgtttacttgtgacataggagggagctttaacttatctatgagcgtagattccataggaagacaaacaagacctctggca

SEQ ID NO: 2416 - DNA, 200 bp, Lawsonia intracellularis
tattttgtcataaaattaatatgctctggtgtaacatgttgtgctgcaatcacgagatcgccttcgttttcacgatcttcgtcatcaacaagtataatcatattcccttggcgaatatcttggatggcatcctcaacactataaatagacatattgagatctctttttttctttaataaaaaccatgcttatgtaaaaaa

SEQ ID NO: 2417 - DNA, 200 bp, Lawsonia intracellularis
tctaaagtgatatttgtagttttgttttcattagaatgtatagaagatatgataggatttagcatgttgtaaatatattttgctataatgtcagtttccatatttacatgtgtacctactttccaatttgaaatagttgttatattccatgttgcaggaataatattaacttcaagaaaaccagagccacaattatttac

SEQ ID NO: 2418 - DNA, 200 bp, Lawsonia intracellularis
agttaagctaattccatctaatgtaacagaacctttagaaacaacttctttactaaattttgaaggaaaaataagtttaatacagtttgatttaccttgtttttctatagattgaacagtagcaacacaatcaatatggcctgttacaatatgtccatttaagcgttcaccaacagcaatagattgttctaaattaacag

SEQ ID NO: 2419 - DNA, 200 bp, Lawsonia intracellularis
aatttccaacaaccaatttaccaaggtttgttctttggagtgtttctaaagaggcgtatacagtaaaagtagtgcttgtatattgttcaacagtaagacatgtaccatttatagcaatggattcacctgtggagataatttttagagggaaaagtggttctactgtaatacgtacttctttaccataatggttaatagag

SEQ ID NO: 2420 - DNA, 200 bp, Lawsonia intracellularis
taaatatttccacaaccttgagtaacacctgtaaacatagattacatttccggcctaaaagtgagatggatatctgaacctgataattccattgtatgtattttgagggaaatagcatcatgtatagttaatggatttctaccattaactataggtaatgcattgttatctcctaaaattttaggagataaataaatatg

SEQ ID NO: 2421 - DNA, 200 bp, Lawsonia intracellularis
aagttcatcaacaagattagctttgagaagtgaacttcctaatttccctccaccttcacataacatataaagacatccttgtgttgaccttatatgttctgtaatatctgtcaagatagcagatagatcaggtgaccaattttttaatgtaactattttaacaccttttttacgtagtgttgttgcctgttgtgttgatc

SEQ ID NO: 2422 - DNA, 200 bp, Lawsonia intracellularis
cgctttgtggcgttgtataaataatggtttctgttggcctactattaaaaagatagatatcttgttgttcaggaagtgttgatgtaataattatagctaatggttgttgtatcttattattattattattattacgacaagttagttgaggattatcgagttttaatgtattaccgccaattaaaatagcacctcctact

SEQ ID NO: 2423 - DNA, 200 bp, Lawsonia intracellularis
tttccaacattctctcttaacttatgaactttttgtcgagatacttcagatgaaatccatttagaatgtccagtactagtagcaattttaccatctagcgtagttgcaagctttagtaatatatatggacgagaagtgttttgccatgttataaaatcagcaattagtgcttggcattctttttctaagattcctacttc

SEQ ID NO: 2424 - DNA, 200 bp, Lawsonia intracellularis
gacagttatacctgcagatgttaatgtatgtacaccacccgaggcaagagtagtaggatcttttgtacctattataacatgctttatattgttatcaatgatggcttttgtacaaggaggtgtcttaccataatgattacaaggttcaagtgttgtaataagtgtacagtctgaaagattaatatgtttattttttgcat

SEQ ID NO: 2425 - DNA, 200 bp, Lawsonia intracellularis
cattaatacaaagaacctcagcatgtggtcctccatataaagagtgaaaaccttctgcaacaatctttccattttggattaatacagagcctacaacagggttaggtgctgtatcccatcgacctttttcggcaatgcttatagcatatttcatagcataatcatatggatgattcacttgtaaactcaaaggtagaatt

SEQ ID NO: 2426 - DNA, 200 bp, Lawsonia intracellularis
attttgtttagatgtaagttgaattaattcaactccagcttcattaagcattttttttgcaagttcgtcagggtatggaatagtataccaaatagtagtaatattgcaattaataagcatttttgaacaaataagacatggttgatgtgtacaatatacttcagcattatttaatgatatagcatggatagcagcttgga

SEQ ID NO: 2427 - DNA, 200 bp, Lawsonia intracellularis
taataatattttgttctgcatgtaaaccacgacaaatttcatgtcgttgacctgaaggaatgcctagttgatctcttagacaacctacctctgaagcatgaggaagttttgatggtgctccattatagcctgttgctaaaatccttctttctttgacagcaattgcaccaacttttttacgaagacatgtcgaacgttct

SEQ ID NO: 2428 - DNA, 200 bp, Lawsonia intracellularis
gccactaaatgagcaatacccataaagtagtcagaccaagataagcgggacatatcaaatccttacatttgtatcactaaaaaaagatgaagaaagataatgaatatctgactctttcttcatttttaccatgaaaagagtggaaattgacgagcaaaataagtaacttctttatttatttctttaagttgagtttcgtt

SEQ ID NO: 2429 - DNA, 200 bp, Lawsonia intracellularis
attgatattattaagagcagtaacaatccagttagcaacctttatcatatcttgttcacataaacctcgagttgttaaagctggtgtgccaatacgaataccagatgttacaaaaggagaaagtgtttcaaaaggaactgtatttttatttacagtaatgccagcttgatcaagagctttttctgcatctttacctgtaa

SEQ ID NO: 2430 - DNA, 200 bp, Lawsonia intracellularis
tttttttatttgttaagtcaattaatagaagatgattatctgttcctccagaaacaaggttaaaaccagcatccaaaagttgttttgcaagggttttagcatttaagattacttgtttttggtaagttacaaagctagcttttgaagcttctcctaatgctactgcttttgctgcaataacgtgcataagtggcccacct

SEQ ID NO: 2431 - DNA, 200 bp, Lawsonia intracellularis
tgtatcccagggaaaatttggctattgattaccttccccatatcttctgtagaaagaatcataccaccacgaggaccacgtagtgttttatgtgtagtagttgttgttatatgtgcgtatggtattggagaagggtgtaagtttgtagctacaagcccagcaatatgtgccatatctacaagaagttttgctcctattgt

SEQ ID NO: 2432 - DNA, 200 bp, Lawsonia intracellularis
atcagcaattgaacgaaatttagaaaagtcaataatacgtggataagcactagctccagctacaatcagttgtggtttatgtttttctgcaagctttgctacttcttcatagtcaataagtcctgtctctttgttgacaccatacgatacaatattaaaaagtcgacctgaaaagtttacaggacttccatgagttaaat

SEQ ID NO: 2433 - DNA, 200 bp, Lawsonia intracellularis
gtcctccatgagataaattcatacctaagattgtatccctaggcttaatgagagcaaaataagctcccatattagcttgacttccagagtggggttggacattagcatattcactatgaaaaagtgctttagcacgttctatcgctaaattttcagctatgtcgacatattcacaaccaccataataacgcttcccagga

SEQ ID NO: 2434 - DNA, 200 bp, Lawsonia intracellularis
taaccctcagcatatttatttgttaaaattgttgattgtgcttctcgaactgcagttgaagcaatattttcagatgcaataagttcaagcttatctatttgtcggccactttctaagataattgcttgggctaattcagggtcttgaagtattatttgatccatttcaatatccttcaacctaagaaaaaagagtggttg

SEQ ID NO: 2435 - DNA, 200 bp, Lawsonia intracellularis
tttttataaaaatatttaattaatataaaggattagcattcaaatttttttaaaattaaactagcatttgtaccaccaaaaccaaaagaattacttaatacatattgagggttaagttcttgtggtccattaggcatatagttgagatcacaatttggatcaggtgtagtatagttaatagttccaggtactatacctgt

SEQ ID NO: 2436 - DNA, 200 bp, Lawsonia intracellularis
atatagagacattacagaaaagacagcctcaataccaccagcagcaccaagcaaatgaccaatttgagatttattactacaaatagctatgttgtatgcatgattaccaaatgtttttttaatagcaactgtttcatacatatcattgaggaaagttgaagttccatgtgcattaatgtgagtaattttttcaggtgcta

SEQ ID NO: 2437 - DNA, 200 bp, Lawsonia intracellularis
tttgagcattttttaatgcttgtttcatagcaaaactcattccttcagcatcttctcctggtgctgtcatgtgacttgcatcatctgatgtaccaaagccaataacttcagcataaatttttgctccacgagctttagcatgttcaagttcttctaacataagataaccagtaccttctcctgcaacaaatccatcacgg

SEQ ID NO: 2438 - DNA, 200 bp, Lawsonia intracellularis
tttttatcaaaaggtcttgatgcttgagttggcatatcattatattttgttgagagagcttttaatgctgaaaaccctgagatacaaagttttgtaattgttgattcaacaccaccagtaatgcaagcaatacaacgacctaactgaatttcagagtatgcaagaccaatagcatgtgttcctgaagcacaagcacttgt

SEQ ID NO: 2439 - DNA, 200 bp, Lawsonia intracellularis
tacaacaaaattagaaccttttgctccagtaaaaatagctacttgtccgggagccatattggatataagcataggaatcataaatggagatatcctattaggtcctacttcttgaagtttttcatgaaaaacttcaatagtttttagaccacccaatccaacaccaagaataattcctacttgataagcatttgcttctg

SEQ ID NO: 2440 - DNA, 200 bp, Lawsonia intracellularis
tgatttgaagtccagaatcttttatgagttcactagcactagctacagcaaattgcacaaaacggtccatccgtttactttgttttggaaggataccatagttctcaggattaaattgttttacttcaccagcaatcttgcatgcgtattcactagcatcaaagagcgttataggtgctattcctgattctcctgctaag

SEQ ID NO: 2441 - DNA, 200 bp, Lawsonia intracellularis
agcttactccaactttctttaagattattacctaaaggggttatagcagaaagcccagttactacaacacgtttttggctcatgtatactccttaaaattaatcaagcgcctcatgattaggagagacgctctgacacaacacataaaaacttagtttagctagacattgtcctgtacactattaatataatcaatagca

SEQ ID NO: 2442 - DNA, 200 bp, Lawsonia intracellularis
tcttttactgtaagaattttttgtgcatcttcatcagcaatttcaagatcaaaagcttcttccatagccataattagttctgttaagtcaagagagtctgctcctaaatcttctataaacgatgcttcaggctttatttcttcagcagaaacaccaagttgttctataattatttttttgactttttcttcaacagacat

SEQ ID NO: 2443 - DNA, 200 bp, Lawsonia intracellularis
gaataagatcctccaactttttagtcattttaatgttatgagactatatttaatatttagattttttaggttttaataaaagataggaatagtaaaaagacatcaacaatacataccaccatttactgcaagaatttgtcctgtaatataaccagcacctggagatactaaaaaaagtatagcttctgcaatatcttcag

SEQ ID NO: 2444 - DNA, 200 bp, Lawsonia intracellularis
gtgttcccaatctttttaaaggaatagattcttgatatgctttttgtacatcatcactaagagttgctgtcatatcagtagcaataaatccaggagctacagcattcactgtaatattccgactagcaagttctttagcagcagactttgttattccaattaagccagcctttgctgctgcatagtttacctgacctgca

SEQ ID NO: 2445 - DNA, 200 bp, Lawsonia intracellularis
ttaccagattgcccaactacagaagtaacatttataatacgtccatatcgttgttttgtcattattttcgctgcttcacgcatacatataaatgcacctctaagattcacgtctatcacttgatcaaagtcttcatttttcatccgtaataaaagagtatcttttgttattcctgcgttattaacaagtacagaaaggtt

SEQ ID NO: 2446 - DNA, 200 bp, Lawsonia intracellularis
tacttgttctttaacttctgtattaaaaaagcgagtaatatcatcggcattactaacatcaaggttgaacatttttgcttttccaccttgggattgtatctgttttataacagattcagcttcttcagatttactaacatatgtaataaatacttgataacctgcttttgctagtgaaagtgccgtagctttaccaatac

SEQ ID NO: 2447 - DNA, 200 bp, Lawsonia intracellularis
ctcttgagccacctgttactatagctgtagagattaaattagccataagatatacctcacttcttgtttgtctacttagcctaaagtaaaaggaaattcaacaagatattttttcttttttaaggttaaattttttgggtacatataaatatgattaataaaagttaagtatagctgcaccccatgtgaaacctccacca

SEQ ID NO: 2448 - DNA, 200 bp, Lawsonia intracellularis
aatgttgctaaaagaacacgcattcctgactgaatacgttgctgttttattgcatctgcaatagctagtggaatggatgcagcagatgtattaccatatttatctaaagttataaatgttttttcatgaggaatagagagtctagaagctgcagcttcaatgatacgttggtttgcttgatgtggaataaaaagatcaat

SEQ ID NO: 2449 - DNA, 200 bp, Lawsonia intracellularis
gtctttaaaagacaaatcatgtttttgaagaatagtagtgcaaacttctgtaagatttctaacagcatgtttaaaaacttcttgtccttccattttaataaaaaatgtgtcgtcaattgtatcacctaaattatacttctttgatgttcctcctccaacagtaagtaaagaagtatatgatccatttgcataacagactg

SEQ ID NO: 2450 - DNA, 200 bp, Lawsonia intracellularis
tgtcctgaacttcagctattgttgaaagtgttttttttccttttaaaactaaagctccggcaccatctccaaaaagaatacatgtacttctatctttccaatttacacgtttggatagagcatctgaaccaataagaaggatacatgctgtagggtcattagcaatatgttgaacaatattaagaccataaatgaaacct

SEQ ID NO: 2451 - DNA, 200 bp, Lawsonia intracellularis
gaacaagctgcatttatatcaaaagccataggtccaactattcctaattttttacttattacacatgctgtgtttggacacaaaaagtcaggagtacaagttgcaactataaggtgactaatactatctgtagtaatttttgcattttctaaagctagttttgctgcaatataacctgcatctgaagtgttttcatagtc

SEQ ID NO: 2452 - DNA, 200 bp, Lawsonia intracellularis
gttaagtatatagcgagatttaattcctgttctagtgacaatccaatcatttgttgtgtctacaagctgacataaatcttcgtttgtaagaatagtagaaggggtgtaggaaccaattccttcaatataaagtgagtttgttgtgaaagggatattcatttattaatactttattataatagaatttaaaaataaactat

SEQ ID NO: 2453 - DNA, 200 bp, Lawsonia intracellularis
caattatggttagattcactgcattgatagtacaaattggctagcaggaatgaccaaaacgggttagttcttcattaagaccaatagaatctattaggcgtttatttgtttctttttgttcaaaaagaacagccattttagttgcattacatatagctttttcattagaggatccatgactaacaataaaaatacctttt

SEQ ID NO: 2454 - DNA, 200 bp, Lawsonia intracellularis
aatcctaaaagtggagcaccgccatattctgcataatcaataagttttgaaaagtttttaaaagcatttttagcaaggaatgttccaatttttgaaaaaatcccagaagaaaatagttcttttcttaaaacacgacttaaagatgagcttaaaccctcacttaattttaatgcaacattaccaacaaaaccatcacatat

SEQ ID NO: 2455 - DNA, 200 bp, Lawsonia intracellularis
ggtgacatcaacatttccagtaaaaagatctcgtccttcaacatttccagtaaaattaatatcttttgccatttttaaaagttcataagcttcttttacttgtgtatttccttttccttcttcttcaccaatactaagaatacctactcgtggagattgaatatttaataaatcacaagcaaaagtatgtcccataagac

SEQ ID NO: 2456 - DNA, 200 bp, Lawsonia intracellularis
caaattgaaaaaggtgatatggtttacagtcaactgtagctccaacgtcaagtaatataagaggatttttttcagtaggcaggattgaagctaatgcaggtcgctctacacctgtgatacgacctataataaacatcccacatgcaacagatgctccagagtgtccagcacttacaataccattcgctaaaccctcttta

SEQ ID NO: 2457 - DNA, 200 bp, Lawsonia intracellularis
acaagtcgacaagcaatctgaatagaggagttttttttccttcgaagaatatcggaaggtttttcatccatgtttgctacatcagatgcatgaacaatttctatttttgtattttttacttgaagtaatgcaagttgatcttcaatttcaggtgtatttccaacaagtataatttttgctcctgttatttgggcagcttt

SEQ ID NO: 2458 - DNA, 200 bp, Lawsonia intracellularis
aactgctccaggaacaactacagatggaccataatctccacccattgcatcaatagcaattgtaatactatgactgttgagcattgattgttttaggctttgtaacttgacggttacgatagacaccacagtttgggcaagctgtatgaggaatagatggttctccacatcctgtacagtatataatagtaggtatagct

SEQ ID NO: 2459 - DNA, 200 bp, Lawsonia intracellularis
actctgtcatgagcacgacgcattccttttcttgaacgtgattttttattttgttgaacagccattaaggcactccttacaatttattaaaattaatagatggatcttatttaattactatatttttaaatgctgcaagacgtggatcaccttcgtctttgctacaattgcaagtttctttattgagatccttaccacaa

SEQ ID NO: 2460 - DNA, 200 bp, Lawsonia intracellularis
ctataacataatccattacagtcaatattacaaagtggtttacttggtaatgaaaggacaaattcttcccataaaatttcagctaggttaacctcaattattccattggactgacgtataatattttcatttatatctttattaataacctctttcccatctatattaagagttggaagaggctcaacatctctaaaagt

SEQ ID NO: 2461 - DNA, 200 bp, Lawsonia intracellularis
atgttgaatagttattaaaacgtcagtagtacacctattacaaggcatgactattttcccagaaattgatccatctaccatgcatccattttcttgtaatgttactgtaattataccagaaaacggttgaacaagtttacaatccatattgaattgtttaatagaattttcccatattgatggagagtcaagaacaaatt

SEQ ID NO: 2462 - DNA, 200 bp, Lawsonia intracellularis
ttttgctctctgatgtatcaagtttaacccagaatgagtccatctttataacctcatgaacagcagtctttacctgttgtcattagtggtgtcaagcttgtttgtaactaatgaaaatatataggtgagagataaagctaatataacttgttacttatttttttgtattaaaaaataaggtagcaagttttctgtgtggg

SEQ ID NO: 2463 - DNA, 200 bp, Lawsonia intracellularis
gagggtaaaggaattgtttgtagctctttttgagaaacccatcgatagcttgaagctgagagtctggttgggtttggtaatacaacagaaagcgtattagttatattttgtgaaaagcaaatatcaaaacaataaagagtaatatgataatgagtatagttatgaataattgttgtaataatgttttctatttgaataga

SEQ ID NO: 2464 - DNA, 200 bp, Lawsonia intracellularis
aaatcccagttgttcattccagttgcgaataatagcactttctggcgtttctccagtttctatgcatccattagggaattcccatagtcttccccagatattgttgtccaatcgttgctgaataaatattttttgattacattgtagaatgcctgtaaccattttaaggcgagtcgttggagtttttttagctaatactg

SEQ ID NO: 2465 - DNA, 200 bp, Lawsonia intracellularis
gacgactaagttgtgtcccatttattctagaattacacatactatagactggacatataagacacattggtttttttttacaaacaagtgctccaagttccataactgactgattaaagtcacgtgcattcttttttggcatgagttgcttgactaaatcatacagtttactttttgtaggctctttttttatatgagtg

SEQ ID NO: 2466 - DNA, 200 bp, Lawsonia intracellularis
ttaatatcaaaaattcttgatagtactcgttctacgttgccatcaatacaaggaaaatcttggttaaaggctgtactagcaattgcaccagctgtataaggaccaattcctggtaattctaaaatatcttcatatcgttcaggaaatgttccattatatttatgcataatgacttgtgcagcagactgaagatgccttac

SEQ ID NO: 2467 - DNA, 200 bp, Lawsonia intracellularis
tcttctataataaccaagaccttcccatgcagataataatttttcttcaggtgcataggctacagaagcaatatcagggaactgttttatccaacgtaaaaaatactcaacacctctatccatttgtgtttgctgcatcataacttcagcaatccatacatgataggggagatatgtttcacgccaaggaagagctcttt

SEQ ID NO: 2468 - DNA, 200 bp, Lawsonia intracellularis
tatttttataaaaccagttaagcaaagcttgttgtatttctttcacaatatagatctttagtaataattaattacatttattttactattgctaatatagtctattgttgattattttatatttttagactaaccagatcaagctgaactactttatacttaaggagtatatcctaatggcaaatcctatagttttaatt

SEQ ID NO: 2469 - DNA, 200 bp, Lawsonia intracellularis
gaaacatcatttggagatattctagtagaactttttactgaacaagctccagtcacagttaaaaattttttaaaatatgtaaatgaaggtttttataaaaatacaatttttcatcgagtaattgatggatttatgatacaaggaggtggattaaatattaaaatggaagaaaaacaaactgatgctcctatagaaaatga

SEQ ID NO: 2470 - DNA, 200 bp, Lawsonia intracellularis
ggcttcaaatgggcttaaaaatattcgtgggactattgcaatggcacggacatctgaaccacatagtgctacttctcagttttttattaatactatagataatgattttttagactatcaatctcctgatgaagatggatatggttattgtgtttttggtaaggtcatagaaggaatgaatgttgttgacaagattcaaa

SEQ ID NO: 2471 - DNA, 200 bp, Lawsonia intracellularis
aaacaaaaacgcatcaagttggaattcattctgatgtcccaaaagatattgtattaataacaaatatttcattatttgaataaaatagttgaatagaaaagagtagtaactagcactagttactactctttatagtgagaatttttttgaaaataaaaataaagatagaaagagtggtgcctggggacaggattgaactg

SEQ ID NO: 2472 - DNA, 200 bp, Lawsonia intracellularis
ccgacacggggattttcagtcccctgctctaccaactgagctacccaggcaatgtgttgcatctctaactgaaagtttgttacttagcaagcattttttataacttattagcataaacatcataaattcttataagacatctagcaatactatttgttaaatgtatttatgaaaatgaagtaacataagtttatagataa

SEQ ID NO: 2473 - DNA, 200 bp, Lawsonia intracellularis
cctaattaattattagcttaagttattatttatcttttgttttttcttcagctgggatgatcaccattgattcaataataacaggtacgataggaacatcattatgcataccaactgtatgagtaggaacttgctttataagatccactatattttgtccgctaataacttgtccaaaaacagtatatccataaccacta

SEQ ID NO: 2474 - DNA, 200 bp, Lawsonia intracellularis
ggagtaggagctttatagttaagagctttattatcttcaacattaataaaaaattgtgttgtagctgaatgtggatcatttgttctagccatagaaatagtatattttttatttaataatccatttgcagcttcattttgaataggttttttaattggcttcttttcttccatattttcagtaaaaccaccaccttgtat

SEQ ID NO: 2475 - DNA, 200 bp, Lawsonia intracellularis
cataaatccatcaattactcgatgaaaaatggttttattataaaatccagattttacataaaaaagaaaattacctgctgttttaggtgctttctgtgtatcaacttctatagtaaacgttccataatttgtttttacaagaactttaggtagttccccagattgaacatcttttaagaagaaaaaagataaaatacaac

SEQ ID NO: 2476 - DNA, 200 bp, Lawsonia intracellularis
ttaatgtaaaaaaagaagctattaattttttcataaaaatctccacaggtctattaataatatttaactatgttttttataattttattataactataggtaaatattgatgctgagcacactagatttcaaatagcatttctaaatcttctttagtaagagatttccaagtatcttgtccaggaataattgcttctgca

SEQ ID NO: 2477 - DNA, 200 bp, Lawsonia intracellularis
acaccacgtttcatttcttgaagtttaaggattttttcttctactgtattttgacagataagcttataagaaaacacttgtcgtgtctgtccaatacgatgtgttctatctgttgcttggctttcaacagcagggttccaccatggatcataatgaatgacgtaatctgcagaggttaagttaagacctgttcctccagc

SEQ ID NO: 2478 - DNA, 200 bp, Lawsonia intracellularis
tttaagagagataaggaagacaggaatttctggagtgttattaaatttatctacttgttcaagtctatctttactagttccatcaagataacaaaatggaatatcagttatttgtagccagcttttgatcaattgaagcatctgtacaaattgtgagaacacaagaactttgtgtccaccttcaacaatatcaaagatca

SEQ ID NO: 2479 - DNA, 200 bp, Lawsonia intracellularis
tatctttgaaagcttcaaatttccctgatgcaagacttccaatagagaagcctggcatatctactttgagtaggcgtggatgacaacatatctgtcgaagttttagtagtgcatcaagtatagacatttgactttttgcaatacccttagtttctatatcagcaagtacttgtgagcgaagttttttagtaagtgctgta

SEQ ID NO: 2480 - DNA, 200 bp, Lawsonia intracellularis
taaagctcgttttgttcatctgtcattgcacaatatgtaatattttcaatttttggtggaagatcttttgctacttctgactttgtccgtcgtaaaataaatggttttacgcgagttcgtaagtattctaaggtttcattatcaccatcgcgtataggtttaataactccacgttggaatgcatgttgtgaaccaagaaa

SEQ ID NO: 2481 - DNA, 200 bp, Lawsonia intracellularis
tccaggcataaggaattcaaataatgaccataattcaaataagttattttcaataggagtacctgataagcaaagacgcatacgtgctttgattgtcctaacagacttagctgtaattgtatttggattttttatattttgggcttcatcaagaataatagtattaaagtaatgtttttctaactcttctaaatctcttc

SEQ ID NO: 2482 - DNA, 200 bp, Lawsonia intracellularis
taagtagagcatatgttgttataactaaatctgaatttacaacttttttgaacatgccttcacgtcgtgttccataaatagttaatctttttaaatctggaacaaatttttctgcttctctttcccagtttggaagaactgaggtaggaacaactataaggtttggtccttcatactttcgatttaccatatgttgaata

SEQ ID NO: 2483 - DNA, 200 bp, Lawsonia intracellularis
aaggaaagagtttgtattgtttttcctaatcccatttcatcagcaaggatacctccaaaaccatattcactaagaaaattaaggtaagatacgccttgtagttggtaactacgtaatgttgcatttaatcctttaggtgtttcaataggtgtaatttctttgaaacttctaattttatttcgtaatgaattccaaaatga

SEQ ID NO: 2484 - DNA, 200 bp, Lawsonia intracellularis
atctgtttctgaattaggaagttcatcaagaatagtatcaagaacaggtgcttcaaattgtttaaattgatgttttggaggtttagttggatcaaagccaagtgcatgaagtttatgagagagtttttgtagccatgtttcaggtaaacttgtatatgaaccatcttttaactggacataccttttacctcgcacccatg

SEQ ID NO: 2485 - DNA, 200 bp, Lawsonia intracellularis
ctttccaaatacgttctaggggtaaatgttgaccatcatattctacatcaatatctaaattaaaccatttttctttttcattactttctacttttgcagtaataacaggttgagctatccttactttatatctggtaagtgctttttctccataaactctccagttttctactagagtgggatatgagtctagtagaaat

SEQ ID NO: 2486 - DNA, 200 bp, Lawsonia intracellularis
gcaatagcttcttctggttccatgaaccataatttgttactgcgtggttgaaagtgcatctcagacagctgtgttataagcgctgattcttcttgctgatctcttcgaataagaaatgtgtgaccttcaaaaatatagcttcctgtttgaaagtcaggatttggcccaggaagagtaaattcgccatgaattgtttcata

SEQ ID NO: 2487 - DNA, 200 bp, Lawsonia intracellularis
tgtattttgtacttctagcgtgagtaaactaccttcttcatcaagaaaaagttttgggtcataggatgctggttggaaaataggttccattatttttagaaattcttctggttcgtatagttcagatgaaggtagtcgagtccatactctatcaagaaattcagaaatattatcttgtggtacaattggggtattagcaa

SEQ ID NO: 2488 - DNA, 200 bp, Lawsonia intracellularis
caagttctttaataagagttggtgacagacttgtctgaacaggatagaaactttgattccaatttacccaaaggggcatttgtccatgaaacgttatttctgtatcttcttctgtgagtgaaaaaggcatctttccttcacgttgcaacaagacataaaagcgtagtccttcatcatcaaggcttggtttaagtttaagg

SEQ ID NO: 2489 - DNA, 200 bp, Lawsonia intracellularis
gctaaaggagtactgacaatagtgcaagggaggtttgtatctctccaaagaagataatattcatgacgtatagcccagaaaaaccatgaaacaagtccttcagggatttcgactctatgtccataatagtctaagaaatgtcctatttgttgggctacttttaaaagctgaggagattgttcacaccagtcaggattacg

SEQ ID NO: 2490 - DNA, 200 bp, Lawsonia intracellularis
taaaatttgttctaatgttgtttcttgatggacagaagacagtccggtcttattttggcgtccacggaagaaagcgacaataagtcttgtaggttcagggtaaaacctaaaaataaggtaatgacgtcctacttctggttcaagagaagtagaaaagaaattccgaaaactttgacgccattcaatattatgttttatag

SEQ ID NO: 2491 - DNA, 200 bp, Lawsonia intracellularis
gttcttcaacaagatctgttgatttatcaagatcattatgaagtttaatagctactgaagcaatatgtttacatacgcccataaatgcttcatgacagttgcatgtatgagaaacacgtgattcttcaataaaaataataagttgtggagaatagttttgaaaatcttcttcttgtacaatactgtctatataccaaata

SEQ ID NO: 2492 - DNA, 200 bp, Lawsonia intracellularis
tcatgttctttacgaatggtaagtttttggacaccattgttttgaataattgattgaccaacatccctaatataatcagggattgaaccttttataaagccttggatcagagatcgggctatattttcctcccgaaaattcatgtactgactttccttacgtatattactatatttaatttttgatattataggacttca

SEQ ID NO: 2493 - DNA, 200 bp, Lawsonia intracellularis
tgtttatatatcaagagaatacatttgtaacaagtaggttttttattctttattctataaataaaaaaagtgagtgaatcaaacttagctagttatcaagaaaaattgttgatagctttttactccaattattttttagataatatgagtgcttaaatttaattctaattataatgtataaaaagatagttatacctaaa

SEQ ID NO: 2494 - DNA, 200 bp, Lawsonia intracellularis
agaaaatattgactagatcttttttaattttttttaattttttagttatctcttgataaaaaatgactaaatagtgttgatgataaaaataaataagagttctgttataacacagatagaatacatctatatgtagtctctaattttaatcatgttatgttaccatattatacattattcataggaatattagattacta

SEQ ID NO: 2495 - DNA, 200 bp, Lawsonia intracellularis
tgtagctatgaatcacagtacactgaaaaaatataacgtattaggataaaaagtatatcaactttctcaatgttaaaataaatcttttttatataactttttgtcatctcattcatatgattgactttcgttcattgtcttactaccctaaatttattacttttttaaaataatactatggagttttaactctctatact

SEQ ID NO: 2496 - DNA, 200 bp, Lawsonia intracellularis
tattaataaaaattgaatcttttttgtttttccataaatttaaattggttctgatgatatctttttggtcaacaggtttaaattaaggtcaaaagtaagataagtataaatcaattttttatattattgaagtagtaaaagaagttatagttattttttgattagctacaatagatttatagttattaaggaaatcatat

SEQ ID NO: 2497 - DNA, 200 bp, Lawsonia intracellularis
ggataaaattatacattataaaactaaaacattagtacattcaattttttttcttctttttttattgacctctctttatctaacaatacattttgtttatgcacaaaaactaacagagcaaaacagtgatgaggaccttagtacagaacaaccagtacatggtggacgtattcgtttaggaacaatagcagaaccaataa

SEQ ID NO: 2498 - DNA, 200 bp, Lawsonia intracellularis
atttaattccttacttgtctacagacggtacttcacacgaaattgctgacttactatttgtatctgcacttgagtatgataaagatttacaagtagtaccactagcagcaaagtcatatgaagttttgaatgatggaaaattattacgatttattatgcgtgaagatgtgttttggcaagatggagtgcaacttactgtt

SEQ ID NO: 2499 - DNA, 200 bp, Lawsonia intracellularis
gacgatatagaatttacatataaattaatgttagagcctaacacacctacagcttatgcagaggactttctcactattaaggagtttaaaaaaacaggccgttttacttttgaagtgtattatgaaaagccatatgctagagctctaatgacatggatgggctcaattttaccaaaacacattcttgaggggcaagatat

SEQ ID NO: 2500 - DNA, 200 bp, Lawsonia intracellularis
taccaaaacaccttttgctagaaatcctataggtgctggaccatataaattaaaaagttgggaaacaggttctcgccttattcttgaggcatctgatagttactttaaaggtaagccatatatctcagaagttatttatacagttatcccagatagttcaacaatgttccttgaattaagagcagggaatttagatatga

SEQ ID NO: 2501 - DNA, 200 bp, Lawsonia intracellularis
tgggccttacaccacaacaatacttaaagcaaactaaaggtccacagtgggaaaaaaattggaagaaatatagatatcttgctttttcatatgcttacttaggctttaatttaaacaagcctatgtttcaagatatattaactcgtcaaggaatttcccatgctattgatcgtcaggctattgtagataatgttcttctt

SEQ ID NO: 2502 - DNA, 200 bp, Lawsonia intracellularis
ggtgaaggagtcgtttcctttggtccttacaagccaggaacatgggtatacaacacacaccttaaaccaatagaatataatccagaaaaagctcgacaattatttacacaggcaggatggaaagatacaggcaatggtgttcttcaaagagatggtaggccttttacatttactatacttgtgaatcaagggaatgaaca

SEQ ID NO: 2503 - DNA, 200 bp, Lawsonia intracellularis
aagagcacgagtagcaagtattattcaaagtcagttaaaagaagtaggaattgaagtacaaattaggactgtagagtgggctgcttttcttaaagagtttatagataaaggaagatatgatgctgttgttcttggatggtctattacacaagatcctgatatttatgatgtatggcattcttcaaaagcacatgaaggag

SEQ ID NO: 2504 - DNA, 200 bp, Lawsonia intracellularis
gattaaacttcatggggtataaaaatacggaacttgatgcactccttgtagaagcaagaacagaacttgatcaagctaaacgcaagccattatatgataaaatacaagaaatacttcatcatgatcaaccatactgttttctttttgtaccttattctttacctattataaaatctaaatttcatgggataaaaccagca

SEQ ID NO: 2505 - DNA, 200 bp, Lawsonia intracellularis
ccagcaggtattatgtataatcttgatcagtggtggattcctaaaaagcttcaataacatataataattatatcaatcattttacatttatttaaaatgattattatttattatttattattaaagtatataacggctgtgactgtagtaataatatatctatttaccatggactgttcatgaaagtgattgaagctcct

SEQ ID NO: 2506 - DNA, 200 bp, Lawsonia intracellularis
acagtaggtttaccaacccctatgcaaaacgttctacggcggttagaagcaaataaagcaactgccacagagcgttcacttgttcaaaaagcatatgtttatgcagcagcagctcatgagggacaacttaggctttcaggagaaccctacctatctcatcctctagctgtagctgaaatgttatctgaaatgggttttga

SEQ ID NO: 2507 - DNA, 200 bp, Lawsonia intracellularis
tgcttatgctattatggcagcattattacatgatacagttgaagatacaaagtgttcactagaagatattgaaacagaatttggaaaacaagttgcagacattgttaatggtgtaactaaaattagtatgatgagttttgaaagtaaggaggaacaacaagctgaaaattttcgtaaaatgattcttgctatgtctcaag

SEQ ID NO: 2508 - DNA, 200 bp, Lawsonia intracellularis
atattagagttcctattgttaagttagcagatagactgcataatatgagaacattaaattttcaaaaacctcataaacgtcagtctattgctcaagaaacaatggatatctatgcaccattagcaaatagattaggacttcatagaattaaattagagcttgaagatttaagctttaaatatctccatccagatatttat

SEQ ID NO: 2509 - DNA, 200 bp, Lawsonia intracellularis
acacaaatttctacctggatgcattccaatagagttgtagaaagaaatcttattgaaagaattatttctaagattaaagctattcttcataaaaacgggctaaaaggtacagtgcaaggtcgtgttaaacatgtttatagtatacataaaaaaatggttgaacaacatcttacactggatagtatgcatgatatccttgc

SEQ ID NO: 2510 - DNA, 200 bp, Lawsonia intracellularis
atttcgagttatcgtagatacgattagtgattgctatgcagtattaggacttcttcactctcagtggaagcctttacatggacgatttaaagattatatctccatgccaaaagtaaatggatatcaaagcttacacacaactgttatgggtcctgaaggagaacgtattgaaattcaaattcgtacaaatgagatgcata

SEQ ID NO: 2511 - DNA, 200 bp, Lawsonia intracellularis
aattagctgagcaaggtgtagcttctcactggttatataaagaacgtaaccattcagttaatttaagtgatgtacctcaatttgaatggttaagagaagttttagatcgtcaaaaggacgaaaaagactctcttgaatttatgcaatcattacgcttagaattattcaaagatgaagtatatgtctttacacctgcagga

SEQ ID NO: 2512 - DNA, 200 bp, Lawsonia intracellularis
gatgttaaagagctacctaaaggagcaacacctcttgattttgcgtttcttatccatacagaaattggtaatcattgtgtgggcagtagagttaatggtaagcttgttcctctttactcagttcttaaaagtggtgatactgttgaaattattacagataaaaataggtatcctagtcgtgattggcttaaaatagtaaa

SEQ ID NO: 2513 - DNA, 200 bp, Lawsonia intracellularis
aacagctaaagctagaaatcgtattcaacaatatcttcgaactgaggaaaaagctgcagctatttctcttggtagagaactgttagaaaaagaagggcgtaaacttggtattagtcttaccaaagctgaaaaagaaggacaccttatatctcttgctacccatctttctttaggttctgttgacgagttactagcttcag

SEQ ID NO: 2514 - DNA, 200 bp, Lawsonia intracellularis
ttggatatgcccgcaatacacctcggtatacattaaaacgcttacagacattaatgtcttcagatgagacttctagttattctaaagtaattgctcctcataaaaagaaaaaagaatcttctgtattgcaaaattttagtggagttaccgttagaggcattgataatatgcttgtacggtttgctaaatgctgtaatcca

SEQ ID NO: 2515 - DNA, 200 bp, Lawsonia intracellularis
gtgccaggtgattctattgttggatttataagtcgtggccgtggtgttattgttcacacagaaacatgtcctaatgttcaagcacttgaatctgacagacttgtttcagttcaatgggatggacatgaaactgttccttttcctgcacgtatttatttagttggtataaatgttgttggattacttgctgatattgctct

SEQ ID NO: 2516 - DNA, 200 bp, Lawsonia intracellularis
agtttttaaagcagaaaatgtgaatgttgaatcgtgtattgttcaacgtttaattgatggaagatcagaaatggatgctaccattggagtaagagatattgcacatttatatcaagttattgataaactacgtcaactacctaatattgtagaagtccttagaaaaacagcagacgagtaatttgtataattatagtatt

SEQ ID NO: 2517 - DNA, 200 bp, Lawsonia intracellularis
aaaagtttgtaattggtggagtaaaagagggtactattgttggaaaaagagcatgataagtcataacaagtataataataccaatgccacattttataataatacctaataatcttccaataagtgcacctttagctgcccggctggcttcttcacgactacgtccattaaggatttccataaaatagcaacctatccat

SEQ ID NO: 2518 - DNA, 200 bp, Lawsonia intracellularis
gctccagctaatgctccaataaaagcacccaatccaaataaaaatggtaatcctaatattgcaccaataaacgctcctaataaacctatccacattccacttgtactagaaccatattttttacttccccaactttgagctatatattcaataatttctccaagaatagctagtccaaataacataataaagaaaaacat

SEQ ID NO: 2519 - DNA, 200 bp, Lawsonia intracellularis
attcatatcagatgtgtttggaccaataaatttccacagagaaataagacctagcataatccaatttgcaggtaatgtaagaatatttaatagaaggataacagataaaataagaagaaaaatagaaggaaataaaacatccatagcaatatcctaagcagacgtaatatgagttagtatgatgtcactatagttatatt

SEQ ID NO: 2520 - DNA, 200 bp, Lawsonia intracellularis
atccagttagtatattttattctacgtatttttataaaagataggtagtaatttgttataactagttgaactagaaataagtgtaaataaaaaaagagagatgaacaagtattgtcttttttacaatacttatgttactactaaaagtagtgtttacgtatgtattagtgtatagtagatagatagtttccaaaaagatt

SEQ ID NO: 2521 - DNA, 200 bp, Lawsonia intracellularis
caatcttacttttttggtatagaactatttttatacatttaagagagataagagaatgtagaaaaaggtagtgctaacaataggcaaattataattatgtctattatatgtattgtcaattaagcaaaaaaataaaatatattgtactaactagtaggatattatcttcctaatattaaagaaagatatgaatgtttttg

SEQ ID NO: 2522 - DNA, 200 bp, Lawsonia intracellularis
ttaaaaagtatacctaagtgtacaaataaatctatatgcattgctttttgtatcatgactgttccatatttttttatcaagtttaagatgcatccagttaagttctaatccaaccataagattttcatatattttgtaaaaagaattaatatttaactctagtacagagtctttttttgtcaaataaagtccatttggag

SEQ ID NO: 2523 - DNA, 200 bp, Lawsonia intracellularis
taagaaatccatttctagataacccactattaggtaaagctgcgaataaggcatattgctttgcaatttctttattatttgttccttgataccatgctagccgtaaattatgttttaatttttcaataaaactaatatccatcagttgtccggcaattccccatgttcctgtaggatcatttccagctattgatgctcct

SEQ ID NO: 2524 - DNA, 200 bp, Lawsonia intracellularis
gtcccacgatcttgccagtaaccatcaaaccccatacttgttcctgtccaatttgaatcataggttggcattcgctttgaaccattactcaaattatctttatcacctgtagtataccatcctaagattccaggtgttacacctgtaaattgatattgtgctaataatgcggcataccatcctgatcgattaaatttttt

SEQ ID NO: 2525 - DNA, 200 bp, Lawsonia intracellularis
tgtattagatgattggtttccatagttaaagtcccaagcaatagaaaaaggaatttcaaatttgtacatcccggtaaaacctagccaccaaatattagcatgttctttgaggagttgtgttccagtaggtgtccaaataaatggaaaaagaagttgatcaggttgtccaaattgtttttgcaggttaaaaacatttttac

SEQ ID NO: 2526 - DNA, 200 bp, Lawsonia intracellularis
ctattcttccataaactccccatggagttatagataagccattatatgtacatggaatagaaagcccaacagtatccattgttgatttatttttaccttcataaggacgaatccaccatgtggtaacaccaatagtatcatttataggagtatttacagtaatacctgttgcatttgaatcaagaatagctgaatcagcc

SEQ ID NO: 2527 - DNA, 200 bp, Lawsonia intracellularis
acaaaacctggaaaagcaaattgctgtagtcccatacggacattgatagaagtatttggtacaatccagtctatataagcatatcttacgccaatacttttgccatttgtaccaatagaacctccataactataatcattttcattttttcctactccccagtcattattaatacgaaaacgtaatacacctttaagatt

SEQ ID NO: 2528 - DNA, 200 bp, Lawsonia intracellularis
ttcattggcttcataagtcgtttgaaatgtaaaacgttgatttgctccaaagtaatcacttgaattagatcgtgagaaacttgtatcaatccaaaacattgagatatcaaaaaaacctgatagtttaatttcactagcataagcatgctgataagctaatggaaagagacaacatactaaaaacagtataataaactttc

SEQ ID NO: 2529 - DNA, 200 bp, Lawsonia intracellularis
tcattctaactccaataaaaagaatagacttatttattacatgtatttttatattattatatagtgtataacctttttcttaggagtttaatattataattaacaaaaagtagaaataaaattaatagaagaatacctaatatcattagataactaaaaagaacgatatagctcaatttagtataatattatatatgaaa

SEQ ID NO: 2530 - DNA, 200 bp, Lawsonia intracellularis
cataacacttattattctatacttagtacatgtactaagtatagaataaaataaatatagaagaggttaattctattacattcatgataaagtaagttataggctatttttattagcttactattaaggtaggatgtgacataaaatatttttttaacaaattatgataaaaggttaaattaatataaaaattatgttat

SEQ ID NO: 2531 - DNA, 200 bp, Lawsonia intracellularis
aatatttttttattaaacataattttttattgttttttagaggttgttacaaaaagataaaaatgttattagagttagttattaattactattataattttttttttttattggcggaagcgtataggagtcgaacctaccacggacaagctgcccgccattggttttgaagaccaacgaatattattttcctagatttt

SEQ ID NO: 2532 - DNA, 200 bp, Lawsonia intracellularis
catcaatttttattatccttataattcaataaattattaatacactctctttcctttattttcctaatatgttatttatctgacctaataggttggaaatagggttggaaaaaaaggagacaaagaatggccgccacaaaaaggaacaaaacaaaatatcccggagtattcttccgagaagaaaaaagaataggtgcctc

SEQ ID NO: 2533 - DNA, 200 bp, Lawsonia intracellularis
tggaagcgaaaaggtctactatgtcgtattcaagaagaatgggaaggttattgaagaaaaagtaggacgacagtttatcgacgacatgactcccgccaaggcttccagaatacgttctgagcttatagaaggtaaacgaaaaaccaaaaaactagccaaagaagaagctcttgctgcttcgctcagaaaaaatattcatg

SEQ ID NO: 2534 - DNA, 200 bp, Lawsonia intracellularis
gtatttgggaagagtatgccaagggtcgccctaaaaacaaaaatactgatattgacctgtgcaggtatgaacttcatttgaaaaatatatttgggcataaatttcctgaagaaatcacaacaaatgatgttagaatattcaaagataaccttattcaatctggaaaaagcccacaaacagttcttaatactcttgctttg

SEQ ID NO: 2535 - DNA, 200 bp, Lawsonia intracellularis
cttcgtcgtattctgcgctttggtgaaaaaaatggcttttgtacactacctgatagatcacaacttgtttttgagatgccaaaagtcgataatataaaaactgaaaacttaacagaaacacaactaaaagcattgatggaagctcttgatgctgaaacagatcaggttatggcttcttgccttcgcttagctttagtaac

SEQ ID NO: 2536 - DNA, 200 bp, Lawsonia intracellularis
aggcatgagaaaaggagcattactagcattagaatggacggatttagattttgagcaaggtatcattacattacaaggaaaatcagctaaaaaaggaaaaacggcatacatacccatgtccgaagctgcgaaaattatcttggaaaaacttccccatacgtctcgatatgtttttccaaatacaaaaggagaaaagcgat

SEQ ID NO: 2537 - DNA, 200 bp, Lawsonia intracellularis
ctgactttcgtagtatgccaaatagaataaaacaaaaagcccaattacccgctgatttccgtccatttcatgggttaagacatacttatgcttcacatctcgcttctagtggaaaagttgacttatatactcttcaaaagttactgactcactcaagtccacaaatgacgcagcgctatgctcatcttgcagatgaagct

SEQ ID NO: 2538 - DNA, 200 bp, Lawsonia intracellularis
atgaaacgagccgctcgtgtagctgatgatatattaaccagcaatatggagaaaaaagatgacgactgatattcttcagaaggctctagagagtagcttcaattcttttgtcaagtcagaatacataaagagaaattttgaatatacaagtcaggaagatgctgtgtggctaaaagaaaattggaatttgccattgatgg

SEQ ID NO: 2539 - DNA, 200 bp, Lawsonia intracellularis
aattgaattatgattttgacgacattttttcaatattatttttaaatgacttaataacttattttcatcaattaattaataattttgaatatcactcgtttattacaacagtttacgagcaagattttaaaatgattataaataaatatcaaaaatggattaaacacgtatataatatttcgtgtcaatataaactatcc

SEQ ID NO: 2540 - DNA, 200 bp, Lawsonia intracellularis
tttgcagatctatgccatccatttaatatagaagaattcataaaaaataaaattcgagatacacaactacatcttccaacatttatttcgactactacatcaactggctttgtagggacaagtcgaatagatggaaaatggaagttcgttgtagattttacaaaagaagatttgaattacgaagcacttctaaatctatt

SEQ ID NO: 2541 - DNA, 200 bp, Lawsonia intracellularis
taaagagcaactagctatagagtttgcgtacttatctaaaaaaattactcctcatattgaaaatgtactaacagaaatagtaaaggaagataatcgtactgaaacttatgaaaattcgagattaagtcgtctatatggtctagctcaatgggaccatcgtttgaaatatattgacaccaaaggaaataatattggaaaat

SEQ ID NO: 2542 - DNA, 200 bp, Lawsonia intracellularis
ttaaatgtggtcttagaaaattaaattggccgtattgcgaaagcgaatgtaaaagtgataataaatattttatatgtaaaaatagagaagcttgtaagaaggcactaaaaagacaactacaagggacgatacaaagtatagaaaataaaaaaagtgtagctatgattgaaacaggttgtacaatgcctaagaacgccaaa

SEQ ID NO: 2543 - DNA, 200 bp, Lawsonia intracellularis
aaaatttttgaaagatattccatgcctgatgtaacgaaaatttatcctttggcctaccttcacatctaaaggggacactacatcatttgaaaaagtccctagaaaaataacgtataatctcggaacgtgggtgttgcaaaacacccacgtttttttttgaggaggaattatggaccaagccacttggctgtcagaaaagg

SEQ ID NO: 2544 - DNA, 200 bp, Lawsonia intracellularis
ccgtagcgcagctaaccggtatttccgtatccacgttgcagaagcagcgtttttaccatcgcggcataccgtactcgaaaataggacggctagtccgctactccgttcatgatgtccaggccttcatgacggcccatcgcattcaggtcgcctcagaaaagtaacccaagtcgcccagggcatacccctgggcgctgccg

SEQ ID NO: 2545 - DNA, 200 bp, Lawsonia intracellularis
gaggattttatgccttaccctcagactttcgtatccaacacgtggaacaatgcatctcctgatgatctcatctcgtacatggaaaagcagaaccatgcccgaagtgtcatcagtacctcatataaaaactacatcagcgatttaaagagcaagcgggtctatgacgcatcagaaagactcagatgtacctactattcttt

SEQ ID NO: 2546 - DNA, 200 bp, Lawsonia intracellularis
gccggaacaaaacggaccaatgaattattttgctccaaggactcctgttccttacatccttggaaaggtagcttctgatctcgcatgcaacacagggttcgatcaagtcggtctctataaaatgctgcttgcctatacgctatacgccacagcaggcaactggatcatccgctgtggaagcgaatggacagaacaagcca

SEQ ID NO: 2547 - DNA, 200 bp, Lawsonia intracellularis
ttatcaatatcattgccaccgctccatccggccatcgaaagtccgtcatatcggccttttgtcaggaaccattcaatatatttgaaaaaaacttcaacaagctgagaggttccgatgaaggctctggggatttatcccacacgaagctgaaggttgctcaaagagtggccgccagaatcacccagaaaaaaattgcctcc

SEQ ID NO: 2548 - DNA, 200 bp, Lawsonia intracellularis
tcgctggtaaacttaggcagcactcccacggacgaagactttgaagctctcgtcaatgaaatcgcgggggaagaacaaagccggattgctcaattcatagagcagccgtccctccagttttttacggacaacgtaactccggctggctttcatcgtatctgctatgcccaaaagggtcggctggccatccaatcaacaga

SEQ ID NO: 2549 - DNA, 200 bp, Lawsonia intracellularis
aggaggtttcctgacccggacatcgttccttaagggatctctgcctgaaatgctgaagaattctttctctggagaaggcttcacactacaaaatttcagaagcacataccgctatgaacatccgtttgttgcacttttcattctcacgcagcccgagcaattatcgcgttttctgtacaagtccagcgccttcgaaggcg

SEQ ID NO: 2550 - DNA, 200 bp, Lawsonia intracellularis
acggactgtgggcccgcatcgtttttcatctggcccagagtagtaccccaaacggagaattttctcttggtgaggcgcgcaaaagttactctgatgtcatttctccaatcattcaaaaggagtataacaactcggcacgtcaccagattgccctcagcaacgaagcctacgacatggtaaaagaatatgagaagtctctt

SEQ ID NO: 2551 - DNA, 200 bp, Lawsonia intracellularis
gccctcgattttcaaaacggaactccattcatgagggaggccctgaaaaaagctcacgggcttgcgtgccgatttgcgtttgctgcccatctatggaaccaagctgaagcctcaagctggccaacaaccatcaccgctgatgaaatgaatctcggcgtatctttgagtaaggacagcttggcgcatttcaggttcacgat

SEQ ID NO: 2552 - DNA, 200 bp, Lawsonia intracellularis
cgaccccacgtgccttcgagcgcgaatccatgcccgaaagctgatcgactccctgctgtgtatcgacttcaatatgcagcacgatgtgctcacgcatggaatcacctcgcggatacttcaacagcgtacgggactcaaagccgacgaagtcagaaatgccctggctctgcttcaacagtgcaacttactttccgcactcg

SEQ ID NO: 2553 - DNA, 200 bp, Lawsonia intracellularis
acttcggaggaaaccagctcgtggcagctctcaggccggacttttttcagcagccgatgggcacattcttataaaaaagcgtctacacccatgccgtagacggtggttacgctaaaactcctttccatgagagagcagtccatgagggcagctctctcgtttttttgaccatgaggagcactttttaccgacacaaccgc

SEQ ID NO: 2554 - DNA, 200 bp, Lawsonia intracellularis
tacaaaacagacctctatgctcccgtactgatcccctccccacaccgcctatccgcctcacacggtacgtcatcggcaagacgggaggataacgagtctgaggccattccagaaccaatcagagacgccatccccagaaagcgcactgagggatctccactgccgttacgaggcctaacgctccacatcctctttcccac

SEQ ID NO: 2555 - DNA, 200 bp, Lawsonia intracellularis
ccacaaaagcagacagacattcgcagactcacagagcgtcagaagacctccaagttcaacggtcaggacgatcacaaagttccgaatctctgctgctcacaagccaccgcaagacaccctgaaggtcgtcataacccctaaagccccaagacgctgaactccctctcccctgctctccatctagccgaaaacctgtgaca

SEQ ID NO: 2556 - DNA, 200 bp, Lawsonia intracellularis
gaaccagccgctacctcaaacggacaagccgaagcatcatgcctaacactgctcaccatgaaaccaacgctcacagcaaacgcaggctgaaaggacaagcgtaccaggcaagaagatttacccggccacaaaggcaacaccattcaaaacgagaggacttagaccaggacatccgatttttagcggaaaaatcagctaaa

SEQ ID NO: 2557 - DNA, 200 bp, Lawsonia intracellularis
aaatccctccccccgatttttggcacgccgttttcatatttgtacgataacactctaaggttttgatgtaagagaatgaagaaggaacatgagcttaccatgttccttcttttttatccgtcatcttagaataagatgatataagtttataaaataattcggacaagatattatgtaaccaaatcaattattttcacaag

SEQ ID NO: 2558 - DNA, 200 bp, Lawsonia intracellularis
tatactttttctaaacatgtaaataaattatatattttaataggtatcatgtagtatatataaacaacattaaaaaactatatatacagaatttacaaataaacataatacatcatatctcataaaaactgtattctaaactatcacatcaaaaaacattttaactccaacaaaaagaggaaaagcatgaataacaaaaa

SEQ ID NO: 2559 - DNA, 200 bp, Lawsonia intracellularis
ctatttccatactatcaatgaaagaattgaaaacttacttatcaactatatatcaaatcacaacaaagtattaccggtattcttcaacgtcagatatcctcaacattatccttaccctcaaaagaaagatatttcctcgttattcgataaggtcaatacgtattattttcgtttaggttatgatccttactacttttgga

SEQ ID NO: 2560 - DNA, 200 bp, Lawsonia intracellularis
aaagagaacagaatatatcagaacaccaccattaccactgcttgctttttctgaatggtaacaaaattcaacgtatcatgccggtattcaagacagtcgaaagattctgggcttctacattgggtatagagaccgctttaggactggtacattactgcttgaaagactggaaaggagatttgacaggtaatggtactatg

SEQ ID NO: 2561 - DNA, 200 bp, Lawsonia intracellularis
ctcagacgagatgatcctgaattgtcctataaactagacagatttcgtatggctgcttcctatctggcaaaaacagctacttcaggttttgtgaatgacggatatcggaactttggctgttctcgtatataagtttatgtaattttttatttttacttttatattatagagttcgaataacgataatcagtcttatttat

SEQ ID NO: 2562 - DNA, 200 bp, Lawsonia intracellularis
tggagtagcacatgaaaaagcaagaagtttctgtcccggaaaaacatcttatcagtatccacggcaatgatattccaagatttttaggcatggtcgacatagcgcatcaactgggtctacaatcaattgatactataccactacaattcccttcatctgacaatggaaataccgctatattcaaaagtacggttactttg

SEQ ID NO: 2563 - DNA, 200 bp, Lawsonia intracellularis
aaaagcggtatcgtatgttctgctataggagatgctacgcctgaaaatgttcctcctgcgtgtcgtaacgccttcatccgtatggcaagtacacgagcaaccagcagagctataggacttgcttgtaacgtaggcactctggattttgagtccgaaacgatgaacgaccaggtgatcgatgtggattaccgtgatagctc

SEQ ID NO: 2564 - DNA, 200 bp, Lawsonia intracellularis
tgcatcatctaccgtccaaactgctcatagcaagcccgtaagtcagaaacagcttgagtatattcatagtctcagtgacaacgcagaacagatagccatggaaaaattcagtaaggacttgaactctctgacaacaacagaagcgcatgaagttatttgtgagtgcagagccagggagaaataatacattgtatgatacc

SEQ ID NO: 2565 - DNA, 200 bp, Lawsonia intracellularis
gtcgtagctatcaaaagcaaaaaagcctcatcgaatccaagtccaagaagaagggactatccggtaatgagtcctcccaaaagatcatcaacaagaacatcgatgaacttacaggggcagaggaagatttagttataaaatcaattttataattatagtgtgatattcgaacaacaaggagtgtagtatggacttatttc

SEQ ID NO: 2566 - DNA, 200 bp, Lawsonia intracellularis
aagaacatccaggcatagaactgagaaatataatcaaacaaaaggatatgaacatctctgaatttgcgcgtatgattgatgtctctccatcacgcatcaatgagattgttcacgccaaaagaagcataactcttgacactgccataagactcgccaaagcactcaataccacaacaaaatactggatggaaaaacaggta

SEQ ID NO: 2567 - DNA, 200 bp, Lawsonia intracellularis
gattatgatatagctcaattgcattcataagcagtaaatacattatttggatgcgaaaagaggatcgactttttacagccgatcctctcaattttagcaattatcgtaagtcgttgttgggcatcatatttaacggattttgcttcataaatttgatacctcatttttttgattatttgatgtgtccatattatccagcc

SEQ ID NO: 2568 - DNA, 200 bp, Lawsonia intracellularis
ctatacgatgggctgttatcaaattgttatcggtggtgataacggggggtagcagggttgttgttttctctggtggtttacaactacattttaccacgaaaggcagggaaatgcaataaccatccttgctgtggcgtatcaaggaatcttactgaacatatggcgcaccttatccaaacggctgtttggacgacggggct

SEQ ID NO: 2569 - DNA, 200 bp, Lawsonia intracellularis
ggatgattggctcgccgacagtggcctgataccctttcagttccgtcaggcacacactccgcccgttggtgtaaaaggccaaatcagtacggtatgcctgtatgcaacgggcgggaatctcgccagtaaagacaacttcatccttttttatctgggccgtttcgatggtggcacagtatttcggcgcatcatgataagcc

SEQ ID NO: 2570 - DNA, 200 bp, Lawsonia intracellularis
ctggaaaggtattcctggggcgcatagagggtgaaggagagataaggttccagcaactgcgtcccagatttcttcaatgcctgttccaatacaatcggggccaatgagcggaagtccgccggcgtactgaccgggctatagtaaagtccgtattcaaagcaaatcttacagtccgttacgttccagccacacaagccttg

SEQ ID NO: 2571 - DNA, 200 bp, Lawsonia intracellularis
ccccaaaccgtaacggataccatccatgacagcgttttgaaaactctggttcaggtatcccagggaaacccggctctcgtattttacaccggagccaagcgggagcggtgtaacagacagtccgatagatgcccaaaacgggttaggcggcacctcgatatggatggtgtgactggccactttgagcggccgctctaaat

SEQ ID NO: 2572 - DNA, 200 bp, Lawsonia intracellularis
aaatgacggtgggttccttcactgctgtttcaatcttgtatttttccgtcagcaaagcggaaacaacctccaactgcatccgacccaaaaaagaaagaatgatctcatgggtggtggaatccacctcgtagtgcaaaagcgggtcagtatccgcaatttgcgtaagagcgtccagcaaccggtctctttgctctgccgtt

SEQ ID NO: 2573 - DNA, 200 bp, Lawsonia intracellularis
tttggcgtaatcgtcgtccgcagcatagggaagggaacatcactccacatttcacgaggaagttgggttttgtcccccaatatatcgtttaatctcaagctgtcgctgggaaggatgacaatttcgcccttatgggcggtatctgtccgaacaatctcccctttggatggaatacgcatctctgtgattttcagcttttc

SEQ ID NO: 2574 - DNA, 200 bp, Lawsonia intracellularis
tctcccggctagggccaccgtatcccgcagacgcagcgttccgctgtatagccgcagatagacaagcctctggccgcaatctgtatactccaccttaaaaactctaccgcacagggcggcgctcccctgttccttggtcgattggaacagccctatcaccgcatccatcaactgttgaatgccaaggccgtttttggcgc

SEQ ID NO: 2575 - DNA, 200 bp, Lawsonia intracellularis
taccatgatagaccgggagcagggaggcgtcttgaactcgccgctgttcttcttgcgcaagttctttctgactgattgattctcctgcgatatactttgccaataactcatcgttattttcgatgaccgaatcccaaacctctgcactagtgttttctgtcagagttattttcgaggacagcgacactgtctgcttgatg

SEQ ID NO: 2576 - DNA, 200 bp, Lawsonia intracellularis
ataatatcagcggagagcttatcccgaacagactgatatacgctctccaaatcaatgccaacctggtcgatcttgttgataaagataatggtggggatgttcaatttccgtagggcatggaacagaacacgggtctgggcctgcacgccatctttagcggagagcaccaagatggccccgtccaaaacagccagagagcg

SEQ ID NO: 2577 - DNA, 200 bp, Lawsonia intracellularis
gtatacctctgccaagaaatccatgtggccgggagtatccacaatattgactttacaactgtgccactggaaagaagtgactgccgtttgaatggtaattccacgctgccgctccaaaaacatagtgtccgttctcgttgtccctttttcgacgctccccggctctgaaatggttccgctggcatacagcaggctttctg

SEQ ID NO: 2578 - DNA, 200 bp, Lawsonia intracellularis
tcagtgtcgtcttgcccgcatctacatgggcaagaatcccgatattgataatgttcatgtctatcctccatacaaggcccaaaagggcgcaaaaatccccagcggcaaatacttttaccgctggggatcatgacttcggatacatagaaacgcattcagctaacatgagccgttatccgtcacgatatttgataaaaagg

SEQ ID NO: 2579 - DNA, 200 bp, Lawsonia intracellularis
caaaagcattcttaaattgggtacaaaaaccaagcccctgcaaggggcaattatttttgtgcccattatcaaattttatttaagaataccttgccgcatgttgaatagactcctcaaatcaggatgacagcagtcatagcatagcacactctaaaatgcaagaagtttttacccgctgtcccaaataaatcaggagggca

SEQ ID NO: 2580 - DNA, 200 bp, Lawsonia intracellularis
ttcaccgggacaccctccgatttggggcctcatgcgcaaataatttctgtgtccacgatttccgccgcacacgcccgaatattgttagtccctctgcaactcataccacagaccgttgccctcgtcaaagatgtacttttccatgaaattacctccattttttgtgattatcgtgcgcctacccttatttttgaccttgc

SEQ ID NO: 2581 - DNA, 200 bp, Lawsonia intracellularis
accccatttctgctccttttcgacctgttcctgctggtaagctgcctccagtatcctgtccgcctgttccgggccttttccagtgcagccgcaatggctctgctgttgttgcgcgccgtaggcagcacgttggctccggcaaaaagaaacagggcggaaagtcctatgagcgtgacataaagaccgtaatccccggaacc

SEQ ID NO: 2582 - DNA, 200 bp, Lawsonia intracellularis
ggtgagccaagtgtacgcaccgtatacggaagctgcgagcgcaaggcagaatatggccagagctatccacttgtgggccggattggtcagctgatccacgcgacgggccttgctggccgcggcaagccttgccgtcagatcaggacgctcttccagaaaggccctggctctgcgaagctcttccagactctcctgggccg

SEQ ID NO: 2583 - DNA, 200 bp, Lawsonia intracellularis
cgggagaaagctgcttcacataccttgcctcttccgccgctctggcctcggcaagtcttctggctgcggcttcggacatggtcttgatatggggaaaacgccgctgaatttcggcaagcatcagatcgacatgattttcatgcttgaaggtgcactgcacgctttcgtccttcccgtattccaccacgagatagggaatg

SEQ ID NO: 2584 - DNA, 200 bp, Lawsonia intracellularis
gaaccgaatatccccttgccggtaaacgcgcctttgctcatggcgacgcgtttgtaggcccgtcgaatgttggatacgggtacatagaaacgacgatccatgaaaagactgttcagatacagagccttcttcccgaccccgcagggaccgaacggaagacaggatgttctgtctttcttcagttctccgtcatccaggcc

SEQ ID NO: 2585 - DNA, 200 bp, Lawsonia intracellularis
gacgctgcccagccgtgcaggtttgaaatacagcatcctcgactcccgaaggaataacattcatagaccgcggatcatccgcggaaataaggaaaagggggccgccttttacgggcggcccccacgacattgatacagagggtcatgaaacggctttggcgttagacaagactatttgcaagctaaagaatggtacggaa

SEQ ID NO: 2586 - DNA, 200 bp, Lawsonia intracellularis
aatcatgtgataatggttcacagctaggctgtgatggctataagcgattgaataacagaaaataacacctatgcctgaaattttcgacgcgtcgaaatttttagaggaaaccatgaaaaaactactccttttgttatctattctgtttctaaccccaagtattaccttggcggaaggtaatactttcaatgatagtttca

SEQ ID NO: 2587 - DNA, 200 bp, Lawsonia intracellularis
acaaggctaagcgcatactgcaagatgaggtgtattacgaccaccaagttacactatactgcggatatgaatatgatgaccaaaaaaggatatgtctccctgatggatttatagcagagaaacatcaaaaaagatcatataaaattgagtgggaacatagtgtgcctgctgagaattttggcagagcttttactgaatgg

SEQ ID NO: 2588 - DNA, 200 bp, Lawsonia intracellularis
cgcgaaggtcatcctctttgtgtagataataaaggtaaaagtttcaaaggacgaaaatgtgcagaaaaagtaaataaaacatatagatatatgcagtctgatatgtacaatttgtttccagcagtcgggtctgtcaatgctgcgagaagcaataagcaatactcagagttacttggagttcaatctgcttttggaacgtg

SEQ ID NO: 2589 - DNA, 200 bp, Lawsonia intracellularis
tgaggcaaaaatagatgggaatagattcgaaccaccggatagagctaaaggtcaagtagcccgtgctgctctttatatggataaagagtacaaggaatacaatctaagtcgtcagcaaagaagactttttgaggcttggagtaatatgtatccagtcgatgaatgggagtgtacacgagccaaacgaatcgaatctatac

SEQ ID NO: 2590 - DNA, 200 bp, Lawsonia intracellularis
agggaaatgaaaatatttttgtaaaaaatatgtgtatcgaaaaggggttatggtaaacaaacgaggacaatataaatactacctaagtaaatcatataaaaacagatatatattgcgacaagaaaacaatagagagaagtacaggcttactgtctgtacttctcttttttattactcaggagggattatgacgcaatcca

SEQ ID NO: 2591 - DNA, 200 bp, Lawsonia intracellularis
ctgatatcactaaactttctcaggctatgctcatcgtccaacagcaacttcaaccagccataaaggacgccaaaaatccgtttatcggtaacaaatacgccacactcaactctgtcatggaatcctgccgcagccttctttcttcccaaggtatctggcttacccaactcccatgtcctgcgcctgtagaactcgggaca

SEQ ID NO: 2592 - DNA, 200 bp, Lawsonia intracellularis
ggacatatcggattagaaacaagacttatacatgcggaatctggtcaatggatttccagcacagccatcatccctctgacgaaaaatgatccacagggaatgggcagtgctatcacctatgcccggcggtattctctgtgcgcgatccttggtatcgtgacggaagatgatgatggtaatgccgcctcgattactccaaa

SEQ ID NO: 2593 - DNA, 200 bp, Lawsonia intracellularis
acaggccaaaacgcgaataaggcccgtagaagccacacagagacaaaaagtggcatcagacaactcttcatccacgaacaaaattttagacacctcaaatcgccccgtatcgcttcaccaaaatctgcccaaaatcgacggcgtgagcttcaggacggttcaggccgatgatggaagaatgtgcatcgtggcatctgggc

SEQ ID NO: 2594 - DNA, 200 bp, Lawsonia intracellularis
gtacactggagaaaaaggaattgctcagggcttcagggttcaagtgggattcgcagcaaaaagtctggtggaaatatgatgatgctgcataatttttctttcgacttgtcagaagagctgaccttcaccggggcagctcttcttttatgggagatcggctatggaatctgatactcgtagccaaaaactgctcgaaatta

SEQ ID NO: 2595 - DNA, 200 bp, Lawsonia intracellularis
tcacccatggactagacttatacgcaaacaggaacactctgactcagcttggaaatcgggaagagtatatcggcatgagcgaccttggaagttatatgacctgtcctcgtatggccgttctaaataagctccatccccagaacactacctatgccctcaagcctcttctcaccatgcagagggggcattggttcgaggat

SEQ ID NO: 2596 - DNA, 200 bp, Lawsonia intracellularis
gggattgccgacgccctcaagactctggaactgcctctggttcgtcagcttgaaattgccgtcacgcataacggcacgcccatcaaagctcacctggatttcgtgctcgcctccacccatccaaggcctacagtacggatactcgaagtaaaaagctgccagaaactcccggattgcctctacgcatcctatgaaacgca

SEQ ID NO: 2597 - DNA, 200 bp, Lawsonia intracellularis
ggtgtatggacaggtaggactgctgacgcggtactggaaagagccggttttcagtgtcagagaagaaactggacagtatagttttcaagacatgacttttcctgaaatcgcccggaatttttggaacttgaatttgccgtatgagtgggaaggggtagatatcgaagcctgggtactatgcctttcgatgacggatgcaa

SEQ ID NO: 2598 - DNA, 200 bp, Lawsonia intracellularis
aagtcttcggtccttatgtgtcagatgcaggaatgatggatgctgtacttggaaaagcagaggaattttggagtacgattcaccaggtaaaggacggcactctcgacgcatcttccctcaaaacaacaagcggtttcaatcccctatgtgaacattgcctctggaatgccgactgcccgaagttcaaaggaaacgaccac

SEQ ID NO: 2599 - DNA, 200 bp, Lawsonia intracellularis
ccagagttttcccctgaacttgaggagctggaaacttggaaatcggagcgtgcaagtttggatgggaaaataaagaccagagagacaagcatgaaagactggtacgcgaatattttcggtactcaggacggatgggttcaggctggtcattggcggttcaaagcctcagaaatacccggcagacgcacactagccaagga

SEQ ID NO: 2600 - DNA, 200 bp, Lawsonia intracellularis
cagccttgcgggagaactgattgaactttttcatgacggcggaatggatgatgtggacgtgcccgctcttttggctcgtcatgaaaaagtaagcgcaccttcaacacgactttttatctacaagaccagaaaacaggagaagaacgatgggttacaggtctgatgttggactggctcttacgcaggcagccgtacaaaca

SEQ ID NO: 2601 - DNA, 200 bp, Lawsonia intracellularis
ttgaatgaaaagatgaacgccttggataaaacgtccgaggcgtttgctgttattacggacttctttgcctacgcggacaagcactttgaagacactgactccggttctgaagtctatctgtgggaacatctgaaatggtacgaagagtttcctgacgtgggcttcatcgaacatctgctggctgagctcgactgggacga

SEQ ID NO: 2602 - DNA, 200 bp, Lawsonia intracellularis
tttcctgttcattcgcatcggggaagagctggaggatatcgacacaaggggcagcttctgggataaccccttcgaccttggcatcagcagaagcatagtcataagcgatcccaacgactgaaacaaagcactatttccataaggccctgttcatcttgcatggacggggcttttctttttgggaggaaccatgtctcatc

SEQ ID NO: 2603 - DNA, 200 bp, Lawsonia intracellularis
ctgttcaactcgacgccggtcaaattttcagtggcaaatcctccggcactatgattttcggctatgacgcaccctcggaatacacgccgtccatcgatcccaactatcttttccatgagtccagccgtgatgtaatcgtctggtttcttatgcaaaatcccgaaccgctgtacatctgtggccctacgtctgctgggaaa

SEQ ID NO: 2604 - DNA, 200 bp, Lawsonia intracellularis
tcgagtctcattcgccagattgcggcgcggctcaattacccggttttcgaggctaccggacatgaccgactggagttccctgatttggtcgggcatctatccgtacagaacggcaacatggtctttgaggatggaccgcttactctggccatgaagattggcggcgtattcctgttcaatgaggccgatttgtgctctcc

SEQ ID NO: 2605 - DNA, 200 bp, Lawsonia intracellularis
ggctacgcttgctggactgaacaccattctcgacggttctccgctctgcattgctgaaaatggtggagaactcgtcaagccaagccccatgttccgtttcatcgtgacggccaactcaaatggcaacagcgacgaaaccgggctttatcagggagtcatgcgtcagaacatcgccttcatggaccgcttcatgctggtgg

SEQ ID NO: 2606 - DNA, 200 bp, Lawsonia intracellularis
aaatgggctatcccaaagcagaagttgaacgtgacctgctgaaccgtatgttcccggaaattcctgctgaaataacggagaagatggtcgattttgccaacgatgtgcggcggaattttatgggcaactcctcggcacatgatgctctggacgtcacgctttcgacgcgcacactcatccgctgggccagactcaccatc

SEQ ID NO: 2607 - DNA, 200 bp, Lawsonia intracellularis
gcattccagcctctctccaaacagggaatttcgcccatcatgtacgccttggacagagctttaggattcagggcgtccaccacaagtcgggcagctcttcacgaaatggcccagagaatttttccttcaataagcaactaaccgatggagaagattatggaaactcctattctgaacacacctttgcaagttttggacaa

SEQ ID NO: 2608 - DNA, 200 bp, Lawsonia intracellularis
tattctggcactgaatttgaacattacgctttggtcggccagaaagaagctcaccgctgaagactttggtggtgtagagcttccgcctgacgatttggcctctctcggctccaaaaaaatctgcgacccggccagactcaacgtctttaccaagctcaaggctcgtgcgttcagtcttctggataaacatggcgtccgtt

SEQ ID NO: 2609 - DNA, 200 bp, Lawsonia intracellularis
ttctttcgggctgggcgataccggacgacaaggccggagatatcatccaggggctatgcgaaatccgagatgagtttttcacggaaaagcagaactttctgaacgtgtacgatgctgccatagctgactggattgcccgacatccttcctgggccaacatcatcgaaaattcaacggtcagcagggagtatgtggagtct

SEQ ID NO: 2610 - DNA, 200 bp, Lawsonia intracellularis
cggatggggttttcttggcagctctatcgggtatctcctgctgctggtctcgaaagcgatctggccatgacggaatctggtctgcatgaagaggtagaaggtctcggaagtacgctttttgccgaaatcgccaaggatgctgcggagatttggaagaaggtgtttgaaggaaaaacggaggtcacgcacaaggctctgtc

SEQ ID NO: 2611 - DNA, 200 bp, Lawsonia intracellularis
tcccttgaaaacgatgcgcaataagctcgccggtctttccttcatcgaccccaatgtggaaccggctgtctccatgatcgacaccgccctcggaaatatgcccaagcgtggaaatctgtcaggaaacgcgcttcttacgcttcagggcctcgtatgcctgctcaaggacaaggaggcactgattcagcagacacaggcgt

SEQ ID NO: 2612 - DNA, 200 bp, Lawsonia intracellularis
tactggctaccccggcagaagaaaatgtactggatgatctgttgcaggggttccagcaagaagcccccgtactgaatctcccgcctgagcatagctacattccatccagcccacgcctcgatagtttgggtctgtggtaaaaaaggacgcttctatgtcagtcacgatgaaagccatgccgcttgttgcctcgatgctag

SEQ ID NO: 2613 - DNA, 200 bp, Lawsonia intracellularis
gcaacaagctgggggtcaaagtcgttatcggttcttcggataccgcctgcactaacggcgataccatattccttccacctcttcccgttgacgatgaaggagttctgtatcctctggtgagcggctttatcgaccatgaggcggctcatatccggcatacggaccttggcgtgttgaatggaaagagacttacccctgtc

SEQ ID NO: 2614 - DNA, 200 bp, Lawsonia intracellularis
gaaaaatacctctggaatgccatagaggactggcgggtggagcatgaaatcataaagcgctatccgggatgtcatgagcattttatctggctcatacggcattttttcttgaaggatacggaagaagaaaaggctggggaaaatgactccccggccttttctgttctgaactatgtgctcctgacgctgcgttcctggga

SEQ ID NO: 2615 - DNA, 200 bp, Lawsonia intracellularis
tgtgcctgagctggttcgtaattgcgaactcgaagcaaatattatgcaaaaatactggcccggactacgctccagtattgacgcgatcatgcgggatattccggcccgatgccgatctacgcaggattcgctggattttgcccaagatattctccggctgatcgaacaggaagtccagaaggaacagaaatccaccgaaa

SEQ ID NO: 2616 - DNA, 200 bp, Lawsonia intracellularis
gcccagtagtatccccctcgataactgcgcaggataactcagaacaaacccaacaagaaccacaaacaggaggtgaagaacaaccgctccaagaccttctacaagcaacggaagaagagatgccaacctctatgggtaagcagctctccgacatgatttccggccaatgctctccccaacaacacaagggaatgagcgtg

SEQ ID NO: 2617 - DNA, 200 bp, Lawsonia intracellularis
gcagtaacaggcaagctcttaacagccgaacttcccgatgcgcttatcatggaggctcaggccatatccagagcgttacggacaaaactccaagggcttctgcaatcccaaatattgcggcgttccagtccctcacggcatggaaaattatgtgggcatggtctctaccgaattgccgtccatgatcctcggctgttcat

SEQ ID NO: 2618 - DNA, 200 bp, Lawsonia intracellularis
gaaaaccgaatctgtgacaggaatcgatacagccgtccatattcttctggacatatccggctccatgaccagctgtatcgaacttgctggtgcggcctgttactccgtggcgctggctttggctgctatcccgggcatctccgtaggcgtttctgctttccctgccgattataaggaagatgttgcggccacagtttacc

SEQ ID NO: 2619 - DNA, 200 bp, Lawsonia intracellularis
cgttattgcgccatggtaaacgtataacaaactcattcgccgcagaagctcatggaagcacacccatgactgaagccttatggtgggtattggggatgctttcgacacgaccagaacatcgaaaaatcgtatttgtggtaacggacggctacccggacgatcctgagactgccaaagaaacgatagcagtagcgaaacgg

SEQ ID NO: 2620 - DNA, 200 bp, Lawsonia intracellularis
atgggaatagaggtgctgggtatcggcatcgacgccccagccatcatctctatgattcctggctccgaaaacatcaccgacatccgcgaactggctccggctatgttccggctacttcaacaaataatgactgaaaaagggaggtgaccatggcgtcatccatcaaaccgacgacttggctcgctatcgggattcttgtt

SEQ ID NO: 2621 - DNA, 200 bp, Lawsonia intracellularis
cttcagatcgccataaaaatcgtaaaggacacagaagaggaagactgaaggaaaggcactccgggtggtcgccggagtgccttttgcatgtattttttgccggtgttttgccaagacatggatagactttccctctataggttggaaatagggttggaaaataaaaaaggacaagtcacaaactaatgcttcttgtccta

SEQ ID NO: 2622 - DNA, 200 bp, Lawsonia intracellularis
aaaaattcaattatggcggaagcgtataggagtcgaacctacctcagacctctcagcctgacactggttttgaagaccaagtaccacaccggtggcaatacgcttccaagtatttatataatatttttgaacgttaaataactactttaaaatattaacggtttattaattaatactatatcctataataaaatgtaagt

SEQ ID NO: 2623 - DNA, 200 bp, Lawsonia intracellularis
aaacttaactaggctattataaaaataagtataattaaaagttaaagagaaagtttaataaaaagtcattgctctaacattgtcaaatataataatacaatttacaatatacaaagttgcttctaatagtgtctttccccttaagggaatacttcatggaggtagtgtttgaatcaatttaccaggaatctcattttatg

SEQ ID NO: 2624 - DNA, 200 bp, Lawsonia intracellularis
ggggcttatatcccttgcaatggttattgtttttaacctatttagtcagccacaatcttcattacaagaacgtatgacttatagtgagtttttaaatcaagctcaaaaaggtaaaatagctgacgtaattatacaaggcgatattattaagggaaaaacaactgaaggaaaatcttttcagctttatgctccatctgatc

SEQ ID NO: 2625 - DNA, 200 bp, Lawsonia intracellularis
cacaattggtaagcaaacttattgagcaacatgtagatgttcgtgctgagcctattgaagattctccttggtatatgacactacttgtatcatggtttcctatgcttcttttaataggtgtatgggtttttttcatgcgccaaatgcagggaggagctgggcgagctatgtcttttggtcgctcacgtgcaagaatgcta

SEQ ID NO: 2626 - DNA, 200 bp, Lawsonia intracellularis
aaccaggaacaaggaagagtcacatttgaagatgttgcaggtgtggatgaagctaaagaagaactctctgaagttgtagattttttatctaatccaagaaaatttacacgattaggtggtcggatacctaaaggagtccttcttgttggccctcctggtacagggaaaacattgcttgctcgagctgtagctggtgaagc

SEQ ID NO: 2627 - DNA, 200 bp, Lawsonia intracellularis
aggggttccttttttttccatttctggttctgattttgttgagatgtttgttggtgtaggagcatctagagtacgagatctctttatacaaggtaaaaaaaatgctccatgtcttatttttattgatgaaattgatgcagtaggacgtcagcgtggcgctggccttggcggaggacatgatgaaagagaacaaacactta

SEQ ID NO: 2628 - DNA, 200 bp, Lawsonia intracellularis
atcaacttttagttgaaatggatggttttgaatctaacgaaggtgttattttaatcgcagctacaaatcgtccagatgttcttgatccagctctattaagacctggaaggtttgatagacaagttgttgttcctactcctgatgtaaaaggacgtttaaaaattcttgaagtccatactcgtcggacaccacttgataaa

SEQ ID NO: 2629 - DNA, 200 bp, Lawsonia intracellularis
gatgttaatcttgaagttatagctagaggcacaccaggtttttcaggagcagcacttgaaaaccttgttaatgaagcagcacttcaggcagctagagatgataaaaatttaattgatatgaaagattttgagtacgctaaagacaaagttctaatgggtaaagagcgacgtagtctcattctttctgatgaagaaaagaa

SEQ ID NO: 2630 - DNA, 200 bp, Lawsonia intracellularis
aattacagcctatcatgaaggtggacatgcacttgttgcacgtttacttccaaagacagatccagtgcacaaagtaaccattattcctcgaggtcgtgctcttggtgtaacaatgcaattacctgaagcagatagacatagttattcaaaggaatatttattaaataacctgatggtgttattagctggtagagcagctg

SEQ ID NO: 2631 - DNA, 200 bp, Lawsonia intracellularis
aagaaattatatttgatactattacaacaggtgcaggtaatgatattgaacgtgcaaccaatatggcaagaaaaatggtttgtgaatggggtatgagcgagcttataggaccattatcaattggtgagcgtggagaagaggtttttattggtagagagtgggcacattctagaaactttagtgaagatacggctcgtatt

SEQ ID NO: 2632 - DNA, 200 bp, Lawsonia intracellularis
gttgatagtgaagttaaaaaattaatagaagaagctagagaaaaatgtcaagaactattgacaaataatcttgatacgttgcatgctcttgctacagcactacttgaacgagaaacacttacaggtgatgatatagatcttcttatcaagggggaagaactacctccatttataccagaaaactctaatactgaaattaa

SEQ ID NO: 2633 - DNA, 200 bp, Lawsonia intracellularis
aaaagaagattcaaatactgaaacctttattttagatgctgatgagcagaatccatctcctccaaaaacagaataaaaaaaatagaagtggtgtggataaaacacatgaaaagtagtcaaataatcagttatgataatcattggatagttaaagggggtaggcaaataaatcctacccctttttgtattattggaatact

SEQ ID NO: 2634 - DNA, 200 bp, Lawsonia intracellularis
gaatataacgcctgactcattttcagatggaggaagatatttaataacaaaagatgttattgagcatacaaaacaaatgcttcaatctggagcacaagttattgatataggtgcggaatctacacgtccttttgcagaaccaattatagaagaagttgagaaagaaagacttattcctcactttaaaatattaaaagaac

SEQ ID NO: 2635 - DNA, 200 bp, Lawsonia intracellularis
aatttcctgatgttattttttctatagatacgtataaggcttttactgcaaaagcagcattagagttaggtgctgatattattaacgatgtttcaggatgtacgtttgaacctaaccttttagatatacttgtagagtataaacctggttttgtgttatgtcatactcaaggtaaacctaaaacaatgcaagttaatcct

SEQ ID NO: 2636 - DNA, 200 bp, Lawsonia intracellularis
tcatataaagatattatcgaagaattattatatttcttcgagtcccaaatgtctcttattacaaaagcagggttacctgaagatagaattgtgcttgatccagggatatgttttggaaagaaaaaagaacatacagaaataataatgaaaaatattgagagactaaaagttttaggaagacctttatatataggtctctc

SEQ ID NO: 2637 - DNA, 200 bp, Lawsonia intracellularis
tagaaaatcattttttaaacaattttttgatcttgatgtccatgaacgtgatgaagcaacacgtatagctactgcattacttgcagctagaggtgtaagatatcatcgtgtccatgatgtagcaggatgtactcaagcattaaaaataacagaagtttttactccatttttgtaactaaggagttattcataataagttt

SEQ ID NO: 2638 - DNA, 200 bp, Lawsonia intracellularis
aaatctctttcccctaagtgtaattaggagttatttttatggatttcatcccttttagttggagggacttacttgacattacattagtaacgatacttatttatcgagttatcttattagtaaaaggcacccgtgcactttcagctttatctggtctgcttttacttattcttatttatcttggtgcgcaatatttagga

SEQ ID NO: 2639 - DNA, 200 bp, Lawsonia intracellularis
ctttatacccttggatggttattagaaaacttatttggttctctctttttagtaattattattttatttcatgatgatatacgtcaagctctttcaagagtgggtgttcataatttttggaagaaaaagaaagaaattgctccaagtttaattgataatattatttgggcttgtcaacactttgctaaaagacgtatagg

SEQ ID NO: 2640 - DNA, 200 bp, Lawsonia intracellularis
cgcacttattgtttttgaaagagagataccccttacagatatgatgcaagaaggagtgatgttagattctattctctcaaaagaactacttttaacacttttttatccgatgacagcccttcatgatggagctgttattatccgtagaggaagaattgctgcagcaggatgtattttacctttagcacaaatggatcgac

SEQ ID NO: 2641 - DNA, 200 bp, Lawsonia intracellularis
aagcatttggtacacgtcatagagctgcccttggtgttacagaagtaagtgatgcttttgttattgttgtctctgaagaacgtggtgaaattagcatggtttcaagaggaaaacttgtggttgtatctgatattgaacaattgatagagagtttacgtgatgttcttgactacaagtgatcatagaggtaactggaaata

SEQ ID NO: 2642 - DNA, 200 bp, Lawsonia intracellularis
ttttcttattgcttttgctactgcattaattttatggtatacatttaatgcaaaagagcaagtagaaagaattatggatgttaggttagactataaaggtctaccttctgatttaattgtcacagagggacaacttaataagattaatgtcgactacgtggttctttagaaatgttacgtttattttcaggtagagaact

SEQ ID NO: 2643 - DNA, 200 bp, Lawsonia intracellularis
ttcttacacaataaacctttctggtgttactcaaggagttaatactattcctctatcatctattcaattcccagaattacgtgcttatcaaattattgatgttattcctcctcgaatggtactccaagtagatcatgttaaagaagtagagcttcctgtaacattacaattaagatcttctcttttttctgatgcagcct

SEQ ID NO: 2644 - DNA, 200 bp, Lawsonia intracellularis
atttagaagatgttcatattattcctagccatgtaaaagttcgtggtgcttcaaatattgtttcatcaatgaatacagttatagcagaagtttctgcattattagatgacgagggacgtgttgtgcaagacgatgcacctcttattgcaccacagtttgttgaagttagtccacctacagttaatgtctgttttaagtta

SEQ ID NO: 2645 - DNA, 200 bp, Lawsonia intracellularis
gggatgcaacgtcgttctattagtcttcaacgtactgtattactcccagaagaaaaagaaagattaacaactcgaccagagcgagtaactattgtcgtatctgttccacaatctcttttaaatgatcctaagtatatttctcaagtgcatgctagtgtagatacatcaatattagaagattcattaggtaaagattttga

SEQ ID NO: 2646 - DNA, 200 bp, Lawsonia intracellularis
tggagttaaaagacctattaaagtatttcttccagcagcagctcgtcttattaaagtttcacctgatatagttactgtttttcgtcgaaaataatttcaatgtatttgttggagaacataagtgggtaaaaagctttttggaactgatggattacgtggtcgtgtaaatatttatcctatgactccagaggtagcactaa

SEQ ID NO: 2647 - DNA, 200 bp, Lawsonia intracellularis
ggcttggacttgcagcaggaacatattataggcgaaaaagccatcggagtagagttgtaattggaaaagatacacgtatttcagggtatatatttgaaaatgctcttactgcaggtcttcttgcatcaggtatggatgtttttttagttggaccacttcctacacctgctgtttcttttcttacagcaaacatgcgtgca

SEQ ID NO: 2648 - DNA, 200 bp, Lawsonia intracellularis
gattttggtgtggttatatcagcttctcataatccattttatgataatggaattaaattatttgatgctgatgggtttaaaattccagataaagcagagcataagatttctgaaatgattcttgaccaaagtcatacatgggattacccagacccctcaagtgtaggtcgtgcacataaaattaaagatgctttaggaag

SEQ ID NO: 2649 - DNA, 200 bp, Lawsonia intracellularis
atatattgtctacttaaaaaatacatttccatcaactttatctctagaaggactcagaattgttcttgattgtgctaatggtgcaaactataaagtagctccacttgctcttgaagaacttggtgctgaacttataaaaataggtactgatccaaatggattaaatattaatcatcaatgtggctctttgttccctgagt

SEQ ID NO: 2650 - DNA, 200 bp, Lawsonia intracellularis
atgtagccaaaaaagtaattgaaatgagagcagatattggtcttgctcttgatggggatgcagatagacttattgttgtagacgaaaaaggtattatacttaatggtgaccaaattatggcattatgtgctcaagatttaatgcgtcaaaataaattgcctggaaatattttggtagcaacagtaatgagtaatatggca

SEQ ID NO: 2651 - DNA, 200 bp, Lawsonia intracellularis
cttgaagtatttatgaaagaaaaaaaaggagccttgattcgttctaatgtaggtgataggtatgttatggaagcaatgagaaaacatggagctatgtttggaggtgaacaatcagggcatctcatttttcgtgaatatagcaatactggtgatggacttcttgctgcattacaaattttacgtattatgaaacagtacga

SEQ ID NO: 2652 - DNA, 200 bp, Lawsonia intracellularis
acgtcctctttcatctttagctggtttattacaattatttcctcaacgtcttataaatgtgaatgttaaacaaaaacgtcctattgaaacaatgcctactcttttaaaaacaattcagcgcatagagacagcattttcaggacgtggtagagtgttactacgctattctggaacagaaccattgtgtcgtgtaatggtag

SEQ ID NO: 2653 - DNA, 200 bp, Lawsonia intracellularis
agggggaaagcgatagtaaagttaatacatatgctgaagagcttgctgatattgtggccaaatctcttgctgaatgattgtatctattaactaataatatatttacaataggagctttaatgaacattcgtaaagttgtcgttcctgttgctggatggggtactcgttcattacctgcaagcaaaaatatccctaaagaa

SEQ ID NO: 2654 - DNA, 200 bp, Lawsonia intracellularis
atgttgccaatatataataaaccagtcgttcaatatgttgtagaagaagccatgcttgcaggtgttcaggatgttatttttgttaccaatagagataaaagcgttattgaagatttttttgactataatccgcagttagaaagtatacttgagagatctggaaaatacgaacttctaaaagtcattcaaaatgttgctga

SEQ ID NO: 2655 - DNA, 200 bp, Lawsonia intracellularis
aatggttaatattatgtctgtccgtcaaaagcgacaattaggacttggacatgctgttctttgtgcaaaagaaattgttcgtgatgaaccttttgctgttatggttggtgatgacttaatgtttggagaaaatgctggcatggatagacttattcaaattgcccgtgagcagaataagcctgttattggagtccgtgaag

SEQ ID NO: 2656 - DNA, 200 bp, Lawsonia intracellularis
ttccagaagacaaaattaatagatatggtattattagtggtacagaaattagtactgatgtgtatgatattacagaaatgatagaaaaaccaaccttaggttctacacagtcacgtcttgctattgttggtcgttatttattgacaccagacatatttgaatatttagaaaaagtaacaccaggacatggtggagaaatt

SEQ ID NO: 2657 - DNA, 200 bp, Lawsonia intracellularis
caacttacagatgcacttgcagcattagcacaagaaaaaggtatgctagctgttaaacttggaggacttcgttttgatgctggtgactgggtggattatctttcagcaaacgtatattttgcgatgatggatgaaacactaaaagatgatctttttaataaattaaatcagatccttcacatttcagaaaaacaataatg

SEQ ID NO: 2658 - DNA, 200 bp, Lawsonia intracellularis
aatttcattattatttttctttattctcttgtatgaatgaatattgtacaattacactattatcaccaccatattctttattaacatacacattaccttcctggcttccatataccctatggaagccagggctaagagttgctatccttttaggtaaggaaatgttaaggactggtattatactatctttacatactcaa

SEQ ID NO: 2659 - DNA, 200 bp, Lawsonia intracellularis
aaacctgaattacctcataacgttgttcttcgtccaatattatgggcattagaaaaaattcctatattttcatatgaatacataaaaatgatccaggaacttgcattaagacattctatcccttctggaaaaatttttgcttctattcttcctatgggacttcgaacaacacatgtacaaatgaagtgtacgtataaaaa

SEQ ID NO: 2660 - DNA, 200 bp, Lawsonia intracellularis
tgtattaactaaccttcaattaaaagaattaaaacataaaactgaagaagaacttcatgatattggaactaaatggatatctgaagaaaataatgattggttaacatctcaaacagaatcaatgattgtttcagaagaatgtatattaactgttgatcctccatggcctattcgtccttcagcaacacgccaacgtgtca

SEQ ID NO: 2661 - DNA, 200 bp, Lawsonia intracellularis
ttttagattttctttttacaaatggggtagtatctaaaaaagaattattacaaaagttaggtaaagaatatcgaacagcactaacttcacttactcgttatggaattatatctataaaacaggaaatcctaacagataaagatgagttagcaaatactattgccttattacctccacttataccatttggttatactctt

SEQ ID NO: 2662 - DNA, 200 bp, Lawsonia intracellularis
actgaggaacagaaagaagtagtaactcttttaaagaaagaattacaaaaaaatcaagcaaaaacatttttattatttggtataacaggaagtggaaaaacagctatctatcttgagattattcaggaatgtatacgtaataatcaatccgtacttgttcttgctcccgaagttgcattagctcttaaattacaacatga

SEQ ID NO: 2663 - DNA, 200 bp, Lawsonia intracellularis
aattaaaaccgtatttcctattataccttgttatttatctcatggatatcaaagcagtcaacaaaaagaagatctttttagaaaaatagtaaaaaatcaagtagcaaaagttattataggaactcgttcagctctttttttacctttaacaaatattggttctattattttagatgaagagcatgatgcttcttttaaac

SEQ ID NO: 2664 - DNA, 200 bp, Lawsonia intracellularis
aaggtgaacgcttaatttaccatgctaaagaaatagcttggtttcgtgctgttcaatcaaatgcacttttattattaggttctgcaacacctgatataaaaacatttcatgctgtagagaataataaaatttctatagtaaaacttcatagtcgtgttggtggaggagttcttccaacaataaaacttattgatagccaa

SEQ ID NO: 2665 - DNA, 200 bp, Lawsonia intracellularis
cagttggaatcaaaagatgtaacatttgctcgtgaaagtcttactactcttaaagaaacacttgaagttggtgagcaagcagttattttgcttaaccgtcgtggatatgctcctatcatttattgtattacatgtagaaagtctattcgttgtccttcttgtgatgttggaatgagttatcataaaatacaagaatccct

SEQ ID NO: 2666 - DNA, 200 bp, Lawsonia intracellularis
tatctgccactattgtgggaaaagcataaggtttccttgtccttgccctttttgtaaaggaacccaatttttacctatggggcagggtacagaaaaagttgaagaagaaattcgtgcaattttaccttcagacagtatggtattaaggttagattatgatacaactagaagacctggacgtactgaagaaattttaaaaa

SEQ ID NO: 2667 - DNA, 200 bp, Lawsonia intracellularis
cttttgctcaaggaaaatctcaagtattgattggtactcaaatgctttcaaaaggacatcattttccaaatgtaactcttgttattgttgtcaatgcagatataggacttaatattcctgactatagagcagctgaaaaaacattccagctgcttacacagtcagcaggaagagctggacgtggtgagaaagcaggacaa

SEQ ID NO: 2668 - DNA, 200 bp, Lawsonia intracellularis
gtactaatccaaacacatgatacctctcattattgctggaaatttatacaacaacatgattatctaggtttttataagtatgaaattgctcttcgtcaaaaatggctatatcctccttttatcaacttagcattaatacgcttatcgtaccctattgaatggaaagaaggaaaaatttggataaaaaaagtccagtcatt

SEQ ID NO: 2669 - DNA, 200 bp, Lawsonia intracellularis
gttacaagagtgggctaataagttaaatgtatctgttcgtgggcctgcattatctcctattcctatcctgagaggacgtaacagatttcaatgcttattaaaaagtaacaattggcaacatattcgtacaatattttataaaattcaaacaactgctttaccacaaaaacttcgtgtagtacttgatattgatcctattg

SEQ ID NO: 2670 - DNA, 200 bp, Lawsonia intracellularis
atatgctttaaaaactaaaagtaatactttattttttatactttaaataagactaacttatgaaagataaagtatatttaagaattttaaaaaaagtcaaaaaatattatagaaatgcataataactatttagaaaatatttaaatatttttttattatcataataatttctttgtagaataatacataaccttaaatga

SEQ ID NO: 2671 - DNA, 200 bp, Lawsonia intracellularis
tctttctaaataatatacatatatattataaaaatagaaattacatattaaaattaattttatctattactaattatgtagtaataataaatatatgttgcatcattaggttaaaaaacatagttctatttttgttaaagtaaagtttgtagattattagtaaaatatttaaataaaatatattactataagttaaataa

SEQ ID NO: 2672 - DNA, 200 bp, Lawsonia intracellularis
atataataatcattttaatgacgtgttatagtaactatggagtagatatgaataattttattaaagttattactataataataacttcaatagctgctgtacttattattttttctcttactacagttggaatatttataatatctattttatttataacattttttgttttatcagtcatatctaaaataacaggtaag

SEQ ID NO: 2673 - DNA, 200 bp, Lawsonia intracellularis
agtttatataatacaaaaattatatattatacaactaaacataataataataataataatatttatgatctatcttcagatgagtacaaagtagaagataaaaaataaataaacagaacaattactatcagataataacatatttgtcacaacataataaagtaatacattatatattaatttgtctataatacttacgc

SEQ ID NO: 2674 - DNA, 200 bp, Lawsonia intracellularis
tcttttgattaaaaatatacttataacttattttacgttaggtagatatattcttttaaataagagtcattagttattttataaaaatatttaatttcatactatagtaggaacctattgcgaatttttaataataaatgcaaaatgacactagccttattaagcaaacggtatatgctttgtgtttttatacacaaggt

SEQ ID NO: 2675 - DNA, 200 bp, Lawsonia intracellularis
atctaaactaactgttcaaaagtagctgaggattacattgaagtttattactgacttcaaaaagctagatgtattagcgcatcaggcagttacttcagcattgtccacttatcagtatcacctacctatttttattgatgctacagctgggaatggttatgatacatgcttcttagcacaacttgctggaacacaaggta

SEQ ID NO: 2676 - DNA, 200 bp, Lawsonia intracellularis
tagtattagcctttgatatccaacaagaggctataacgaatacatatcaaaggcttatatctttacatttggaacaacaagttacactcataaaaagtggacatgaacgcttatatgctgaaacattaaacttttttcaaaaaaatactcatttagtagagttctaccattttaataatcaaatagatatttgttctggt

SEQ ID NO: 2677 - DNA, 200 bp, Lawsonia intracellularis
gtgatgtttaatcttgggtttcttcctaaaagtgataaaaaaattgttacacaacctactactacaataatggcattaaataatgcattaaatgtattagctcctggaggaattataactattcattgttatacaggacacttaggaggagtagaagaaagtgaagctgttttatattggagtgaacaactttctttaaa

SEQ ID NO: 2678 - DNA, 200 bp, Lawsonia intracellularis
taaatgggatataacaatctataaacaaatttttaaacaaaagaacaatgagcaattagtgcttattaaacgtaaacagttatgaatagtttttcacagccatggatattttatttgtgtgcatcaattgcaataggttatgcattaggtagactaaactataagggagcctcccttggcagtgcagctattttatttgt

SEQ ID NO: 2679 - DNA, 200 bp, Lawsonia intracellularis
aggtattgcttttggtaaaatgggtgcgtctattccacaagatattggtggtattggactattaatatttctttatgccataggaacagatgcaggaccaagttttttaagtgcattgaaaggaaaaggtcttcaattttccatggttgctttatgttttactattacagctgttataactgttgtaatctctggttcat

SEQ ID NO: 2680 - DNA, 200 bp, Lawsonia intracellularis
ggtttgatattgatcctgctggaatggctggtatttatgcaggagctatggtttcctctcctgccttagctggtatattagactctgtatcaccttatcagtctgttataataacaacagcctatagtttgttatatcctgttggtatcttagcaagtattttatatacacaatggattattgcatttgataagtcagat

SEQ ID NO: 2681 - DNA, 200 bp, Lawsonia intracellularis
accagaaaagctgaagaagaattacatcaaaaatctctttttgaaaatccacctattcatattggttgttttgaagtataccctcgatctgtctcttcagttcgtgaaatccataatctttttaatgtaagaatcacacatattattcctgcaggaagaaaagttgtagctccagcatcagcattattaaaaatttgtcc

SEQ ID NO: 2682 - DNA, 200 bp, Lawsonia intracellularis
tggagataaaatacgtcttttaggttctgaaaatgcgttaaaaagagtagaaacctttttacatgcaaaaatagcaaatgatactgattttaaagaacatatacatcattatcaattagtcgttacaaaaaaagaagcttgtggctcaagaatcatgcacttagcagctaaatgccatatggatactcttatgtttgaac

SEQ ID NO: 2683 - DNA, 200 bp, Lawsonia intracellularis
atgttcatagaaatgaaattgatattccacttacaccaagaacacgtttatatatgggggatatcttacatcttagtggggatccaagacaaattgagacattaagaagattattaggcgatgatccaagacaactacaaattgctgatgttatgcctgttatgcttgttattagtcttggatggctattaggcaatatc

SEQ ID NO: 2684 - DNA, 200 bp, Lawsonia intracellularis
cctatccctctgtacgaaggcaaaacatttatggtaagcagttcagcaggagtattgcttacagcaatttttttatccaatataaaaaaattaggttctatagatttttatttaccaagttcatctttactcttattaagagaaacaggacttgccttattttttgctgctacaggagtacatacaggcgcttctttaaa

SEQ ID NO: 2685 - DNA, 200 bp, Lawsonia intracellularis
tatgggaattatccttcaaagtggtaatattcttttatgtggtttaataacaacaatattacctatgatagtaacatggtattttatcaagtttgttcttcatatgaattatctttatgctattggcagttttgctggagcacgtgcaacagcttcttcctttgcaattgcaacagctataaccaaaacaccatatgttg

SEQ ID NO: 2686 - DNA, 200 bp, Lawsonia intracellularis
cagctgtgtattctattgtttttccagtagttacacttttacaaattatgagtagtaaagtggtgtacactcttggttcgctatatctattttaattgctatcattatattattattattattattatttataattatgataaattccatatttttttagttgggttagctttactcagctcttcaagtgtcatatcaac

SEQ ID NO: 2687 - DNA, 200 bp, Lawsonia intracellularis
ttgttgaggaccagcagaccaaggtgcaacttgatatggttggaaaaatatacggataccattaggtattaatgcaattgagttatagttatcaagatcaggagctgtgcctacagataatatttctttatctgacatattacctagtgtttctgacaaagacttatatgaatattctgacataatttttaaggcactat

SEQ ID NO: 2688 - DNA, 200 bp, Lawsonia intracellularis
taacatcatcaaaaatgtctataagatctaatggttgttctgtagttagatcataattaaatacagaaatttctaaatttccatgagctccaccagtaaagtctgttatagtatatataatagatatggctttatcagagggtttagtaatagaatagtctgccctaagttcatagggaccaatggcaagttctttttca

SEQ ID NO: 2689 - DNA, 200 bp, Lawsonia intracellularis
ctattagttgttttaaaattttcaacaagttgttgggcccaacctttgatatcttgatcaatcttactactatgaatttctggataatgtacagaaacctgcatttcttttgttgttatagtaatactatgatcaagaatagaggaaccatctgtgttatgagcaaaacatattgtttgagttataataataaaaaaaaa

SEQ ID NO: 2690 - DNA, 200 bp, Lawsonia intracellularis
taagaaataataataataataataataattaatataacgcataacaaaacctattttatagataaaggtcaaaatataaaaataacacatcttattttaattaagtgttattttataatataaataaagatatttttgtataaacagaacataccctaattataatctatattgactcactatgtttccaaactttttct

SEQ ID NO: 2691 - DNA, 200 bp, Lawsonia intracellularis
tcacctttaatgagacgttgaatattttgtttatgactccaaaaaataagtgccataataattagtgataatggaatatatgcaaattttcctgtaatgaacaaaataataggtaatgaagttactaaaaccaaagaaccaagtgaaacaaatccagaacgccatatgaaaaaagtacataggatagcagcaaataacag

SEQ ID NO: 2692 - DNA, 200 bp, Lawsonia intracellularis
ttgccaaaaagcaattggaataagaacacctatagaggttgctacagcttttcctcccttaaagtgtaaaaagcaagaataaaggtgacctataattgctgctagacctgtcatagtatacataaatggactttcagataaatatgttgctattacaacaggaaaaaatcctttcaatacatcaaaaaataaggtaataa

SEQ ID NO: 2693 - DNA, 200 bp, Lawsonia intracellularis
acccaagttttctaccacaaattcttgttatatttgttgctccaacattaccgcttcctaatgttcgtggatcaataccacaaaaaatattggcaaaaagtacaccaaaaggaatagagccaataacataagaagtaataatccaaataaggtctattatcataataaccccagtatattattttagacttgctgaattt

SEQ ID NO: 2694 - DNA, 200 bp, Lawsonia intracellularis
ctaatatatgaatttcattatgtagtggttgaatattacctatacgaatataaatagactgtcctatttcaggaacagctgtaaaaagttttcgacgagcccgaagagtaagttgctctcttggcaaattaacaacaatgtaatgttctgttacctcagtaacaatagctggccaccatgtattcttatcttgttgaaga

SEQ ID NO: 2695 - DNA, 200 bp, Lawsonia intracellularis
atatataccaacttccaatatctttgtcgaaaccgctgtatttggtttgtatattcaagacgagaagtaatataaggtagcattatctctaactcttttaaagaccatttatatttttcatgttgtaatacatgaagaatttgtgcttgattaaccatatctggatatcgtcttaatggtgacgttgatggtgcataata

SEQ ID NO: 2696 - DNA, 200 bp, Lawsonia intracellularis
tttttctccgatgccagcatgctttttgggaactacatcaagtacagatggtgctaacacttttactacttttgcaatatcatgaggctctttccatatacctttatattgatcaggaattataatgtcttgtgttctataaaaaagagaaatgttattttcataactccaatgagctattgctgcattaataaggatca

SEQ ID NO: 2697 - DNA, 200 bp, Lawsonia intracellularis
taatttcagaaaccaaaagatgagatttaggagtagcaaactcttctgttaatactacttttgtctcattctcttcaactattagagaaagatatggttctgaacgttctactataacagcaccatgtttaagacgatatttttgataggtttgtgctacatgaaaagctaacttcagttgttcagcatatggagaatct

SEQ ID NO: 2698 - DNA, 200 bp, Lawsonia intracellularis
tctgaatagttatcctctaaaatatactcacattcatgataagtaagattagcagcaagagagacagattcaaaagatggtgtacaagattttactacaccatcatagccaacaatacatgtaataataagcacaggtcgagtacattgagcatgaagactgtacttgtctatccctaatacattaggcaacatgttata

SEQ ID NO: 2699 - DNA, 200 bp, Lawsonia intracellularis
acttgcttctggtaaataaatactggttgctctttttctaactgcttgatcaaggggatcatcaaatggccaattcaatgcagggcaggctaatgcaacaaccactttccatccattgtctattggttcaataaaaaaagcatcatctttatcttttgttgtttctgaatcaatacttataaagggaaggggtagggtag

SEQ ID NO: 2700 - DNA, 200 bp, Lawsonia intracellularis
acgttgtataaagagaagattgtttacacaacatgtctatagtgttttggaaaggttgttgccaattatctgtaggatcataatctatacgctcaaaccaaatgttatgatgtggttgtaatattccccatgcttgtgcaagatataaagcaagaaatggatcatcaggaagtcctgttacaagttttttccataactga

SEQ ID NO: 2701 - DNA, 200 bp, Lawsonia intracellularis
ctatcagctttttctggatttgaaatttgttccataatgatctgacgaagctgttcttcaaattgcgtataaacattagcagtattaatagaatagacttttttttgtgtataaagctcccataaataacggaaaaagggtatactatcagtaataaatgcttgctgttttatagttttttcttgttctttaacacgaat

SEQ ID NO: 2702 - DNA, 200 bp, Lawsonia intracellularis
atcaacaatctcttttgaatatatttcaaaattaggtgattgaaatttaaaatgaatattatcctttaaaaggacatgtgcacatgctgctattgtatcaatatctggagaagttgtaactagctcagaaaaccactttgcaggtgcttgaataatttctccttgagcaatctcccataattcataagaattaaaagatg

SEQ ID NO: 2703 - DNA, 200 bp, Lawsonia intracellularis
attcaagctctttacgtttaaacttatgttgttcaatgtgtgctattgcaatatctttactttctatatttctatagtttggacctatccaaggaagaatccttgatgattgtatatttatttcttttctattaggtaataatattttaaatttattttgaaattcttcaagaacccaagcaagttgaggttctttgtct

SEQ ID NO: 2704 - DNA, 200 bp, Lawsonia intracellularis
tgcataaattcaataagataaccagctcctacatggctgacaaaatgttgaaccataatttgtcctaatgtttaaatgagcgttgtccagtgaaaaccatagcaacttgaggagaagattcattgactgctttaataacttcatagtcatttaatgatcctccaggttgtgcgatagctgttactccttggttaatacat

SEQ ID NO: 2705 - DNA, 200 bp, Lawsonia intracellularis
aaatcaacaccatcacgaaatgggaaaaaaccatcagaaaccataacagatccttttaatcctccgcaaacatcatttgtttctttttttattttttcaagcttttctaatgaagttttatcgttagcagcttgttcacgaagctcataaagacttaatccgtaattttggtaggttaatttgtctgcatattttgcata

SEQ ID NO: 2706 - DNA, 200 bp, Lawsonia intracellularis
tgctttgaaaatagctaactctatacaaccaaccctatcttgctctcctgtaccaatagccactgttgcaccatcatgtgcaaatataactgagtttgaacttactcctgcttcaactgaccaagcaaagagaagatcttcaatctgttcatctgttggttgtttagcagatattgtaaccccatccttagaggtagctg

SEQ ID NO: 2707 - DNA, 200 bp, Lawsonia intracellularis
ttgcaggtaaaaaagatgcagtagatcgtacacgattaagaaaagattcttgaagaatcagtccaccatcacaaagacttttgatatcaagatagtgagaatgtgtgagttgatctaaagaatttagaccaggaagttttaagatacgcaaatttttttttgttgtaagtaattctagcacacctggttcataatcaggt

SEQ ID NO: 2708 - DNA, 200 bp, Lawsonia intracellularis
gctgcaatgacctcaaaataatgcttaaaaataaggttagccgagtcatgatcaaggggacggttaacaacaattgcaccaccaaaagctgcaattctatcacaccaaaaagctttttctaatgcattcccaatacttttttttgaccatgctactccacaaggattattatgctttaatataactgcagcaggacgact

SEQ ID NO: 2709 - DNA, 200 bp, Lawsonia intracellularis
tgctaagtattgaagaatgttacatccattatctatatctgtaaggtttgtttttcctggatgtttaccagattgtatcaattcagcatcagtaagtgaagaaataatacctccagatgtacgccaaatcgtatcacctatagttaactcaccagaagtaaattcataaagtgctgctggctgatctggattatctccat

SEQ ID NO: 2710 - DNA, 200 bp, Lawsonia intracellularis
agcgcaatccttttatttccccattgatattccatgttttttttgtatatgtaagtattttatctccaaaactaatagtaattgtggggggaaagtgttcttctactactttatggtacatatctttaagtaaacccattggtattcctctataaaaaatgagtgtgttaaatggaaactatattaactgactcaggcaa

SEQ ID NO: 2711 - DNA, 200 bp, Lawsonia intracellularis
ttagcatagactgccattaatagtaaataacatttgaagcttttggccagttagtatactctctaaaggagaggatgtgaacttaaatttaaatcaatatattattcaagatgttatattgttgttattagttgaagtagactaagtttgaatgtaggaatagatatggaacagttattaataaagttagctagacagct

SEQ ID NO: 2712 - DNA, 200 bp, Lawsonia intracellularis
tgaatctcttgatgaagcttctttaatggcactttgggaaaaatatgctaatattgtatctcagtttgaacctacaaaacgttgggaagaagcaaccttaattttttctttaattcaagcaaagcatatgaagaatcaactgtttaactataattgggcagaacaagttcgtccttctacatcatctcatgaagttccta

SEQ ID NO: 2713 - DNA, 200 bp, Lawsonia intracellularis
tttctgtaatgcttgagacaaaaaataaaccccatgaagttaagcaagcaaaaataattccttttaaaaaacttattgaaaagtcataacacaatctctatacctttaattaatccattgtcacttacctattatctctatataatccattgcgcccatattaggaataataatttagttatatacaattaattataatc

SEQ ID NO: 2714 - DNA, 200 bp, Lawsonia intracellularis
taatagtttttatagtaggatgttatcttcctatacttataaaactagctatttatctttaaataacttttgaaaggaattacacatgaagtataaatggttatatctatacaattcttcctgtgctagtcaggagatactatgcccaatgtagttattattggagcacaatggggtgatgagggaaaaggaaaaattgt

SEQ ID NO: 2715 - DNA, 200 bp, Lawsonia intracellularis
tgatttattaacacgtgacacagattatgttgttcgatttcaaggtggtaacaatgctggtcatacagttattgttgatgggaaaacatatatcttacatcttattccttcaggcattcttcacaaagaaaaaatttgtataattggtaatggagttgtccttgacccacaaatttttatacaagaattagatacgttgc

SEQ ID NO: 2716 - DNA, 200 bp, Lawsonia intracellularis
tatcacagggaatagatgtttctcctaatcgattaaaactaagtaccaagacacatctaattatgccataccataaactacttgatcaggttcgagaaaatgcaagtaccactcaaaaaataggaacaacaggacgtggtattggcccatgctatgaagataaagtttctagaatagggatcagaactatagatttaact

SEQ ID NO: 2717 - DNA, 200 bp, Lawsonia intracellularis
caacctaaacttctttataaaaaaattgaattagcattaaaagaaaaaaatacattgtttactcaattatataacactgaatttgttaatgcagagactatatttaatgaagtaatggaaacagcatctagaatccttccttatctatctgatacatcaagtatattacaagatgcgtttataaaaaataaaaaagtaat

SEQ ID NO: 2718 - DNA, 200 bp, Lawsonia intracellularis
atttgaaggagcacaaggagtacaccttgacattgatcatggaacatatccttttgtaacctcatcaaatacaattgctgcaaatgcatctattggatctggtattgctctttcttcaactgagaaaatcataggtatagttaaggcatacacaacacgtgtaggatctggaccttttcctactgaattatatgataata

SEQ ID NO: 2719 - DNA, 200 bp, Lawsonia intracellularis
caggaaaatttttacaagaaaaaggacatgagtatggtgcaacaacaggacgtccacgtcggtgtggctggcaagatcttgttatgctaaaagatagcgttagactcaatggttttacagagcttgcacttacaaaacttgatgtcctttcagggctcaaaaaaattaatatttgtacatcatatgcttatcaaggggaa

SEQ ID NO: 2720 - DNA, 200 bp, Lawsonia intracellularis
agtgttacttatccaccacaagatgaacacattttattcaatgaaataaaaccaatatatgaaactatgcctggatgggaacattctctagaatcttgtacttcatggaatcaattaccacagtgtgctaaaaactatattgaacgaattgaacaagtagtaggtgttccaataactatcatttctgttggagctgatcg

SEQ ID NO: 2721 - DNA, 200 bp, Lawsonia intracellularis
taatcaaacactttttcgggatatatgattgaagtattataatagacctaaataaacatgttgactgttactagatgaaaattatatcttaaacctgtagaaagatgtatcttctactagttataatatattttaaaggaataaccctagtggtataacactaattatcactagttaaaggaatagaatagaatgaatgt

SEQ ID NO: 2722 - DNA, 200 bp, Lawsonia intracellularis
tgctgtagctgttagtggtggtacagatagtttatacaccttagctacattaagagaggcctttggaaatcatcatgtatttgcactacatgcacgatttaaagaacaaattactaatgatcctgttcctgcacttaaggaacaatgccataaccttaatgtacctttacatgttgttgatttacataaagaatttaatg

SEQ ID NO: 2723 - DNA, 200 bp, Lawsonia intracellularis
agctcattattcgtccatttattaaagcttatgcagatgggaaaacaccaaacccttgtgtacactgtaatgctaaagtaaaatttggtcttctccaaaaaaaagcacaggaactaggagcaaatcaaattgctacaggtcattatgtttcgcttattgaccatgatctctatggtaaagcattaaaatgtggtgctgat

SEQ ID NO: 2724 - DNA, 200 bp, Lawsonia intracellularis
tctacaaaagatcaaagttactttttagctttaactcctagagaacaacttcaaacagctattttcccattaggaacgttacgaaaaacagaagtccgtgaacgtcttcaaaaaatgggactagaagtacccctaccaaaagagagccaagaaatttgttttgtccctaatgatgattatagaaaattcctacagtcatc

SEQ ID NO: 2725 - DNA, 200 bp, Lawsonia intracellularis
tgatgtagacctcttatctgaaggtagaatggttatgcttgatgggacattagtaggaaaacataaaggactatggaagtatactgaaggacaaagacgagggcttggtgtatcttggtcagaaccactatatgttgcacacaaaaatcactcctgtaatgaacttgttcttggcacagcaaaagatatacttgttgata

SEQ ID NO: 2726 - DNA, 200 bp, Lawsonia intracellularis
cctgtacagctcaagatattaactttttagttccacaggataactggccaaaagaactttttgtacgtactcgttacagacaacaagctgtacctgctgatatccaatttgtaactaatacgtcttcatcaaaaaaaataactatacattttcactctccacagcttcctgcagcacctggacaacttgcagctattttt

SEQ ID NO: 2727 - DNA, 200 bp, Lawsonia intracellularis
gacaaatctggttatgtattagctggtggacttattacaaatgatttatagtgtatacaattttttgaaatgatttttctcctatgattaacagaagttataattaataccttgcagatttaaggagatttcatgattggcatatcaaagttatattgtggtcaggtagagtcgtctgatgcattacgatatggacgtca

SEQ ID NO: 2728 - DNA, 200 bp, Lawsonia intracellularis
ttctggaaaacttccttcacatttattgcaattttcagcagataaaaaaccagtagtggtttggaacacaacacgtaggtgcaaccttaaatgtgtacactgttatgcaactgctttagatgaagaaaaaggggcagatcctatgtctacagaacaaggaaaagcccttattgatgatcttgcagcttatggtgcaccag

SEQ ID NO: 2729 - DNA, 200 bp, Lawsonia intracellularis
tattattactttcaggcggagaacctttagttcgtaatgatttagttgagcttgcagcctatgcgacaagtcaaggcatgagagccgttatttctaccaatggaacattaattacaaaagaaaaagcacgtgaattaaaacatgttaacctttcttatgtaggaatttcgcttgatggagcagaagaggtacataataaa

SEQ ID NO: 2730 - DNA, 200 bp, Lawsonia intracellularis
ttccgtggagtaccaaatacttttaaaaaaacacttgaaggtattgaaaactgtaaagctgaaggtcttaaagtaggattacgttttaccattaacaaaagaaacgttgctgatcttccaataatatttgatttacttcgtgatcttgaaattcctcgagtctgtttttatcatcttgtgtattctggccgtggctctga

SEQ ID NO: 2731 - DNA, 200 bp, Lawsonia intracellularis
tctcatccaggaagacttaagtcatgaggagactcgtgctacaatagatcttattatggaaaaaactcgtaagctttttgaagaaggatacccaaaagaagtacttacagtagataatcatgctgatggaccatatgtatggatgcgattgcaaaaagaagacccaaaacgagcagctgatgtttttgaactattacaat

SEQ ID NO: 2732 - DNA, 200 bp, Lawsonia intracellularis
ataatgaaggtaatagttctggaagaggctttgcatgtatttcttgggatggtaaagtacatgcagatcagttttggagacatcatacatttggaaatgtccttgaaagaccattttctgaaatttgggatgacccaaatattgaattgcttcataaaatgaaaaacaaaaaagagcatgtgaaaggtagatgttctaca

SEQ ID NO: 2733 - DNA, 200 bp, Lawsonia intracellularis
tgtcgctttcttaatatttgtggaggaaattttagggctagagctgaagcttattatggagatgtttgggctccagatccagcttgttaccttacagatgatgaaataaaaaaatgaaagtaaaacattatatatatatattaatatattagtgttacgtccaaataaaatgacaattaaacttactgttttttaattgg

SEQ ID NO: 2734 - DNA, 200 bp, Lawsonia intracellularis
cattttattttataaaaataaaggatactcatgaatactattttctttcgtggccgtaggcttcgacgttcaatacaagttcgtgatttaatccaagaaactagattgcatagtcaagacttgattatgccttattttgttgttgatacagataatagtaatttttttcagcctataccttctatgcctaatcagtatca

SEQ ID NO: 2735 - DNA, 200 bp, Lawsonia intracellularis
gctttcactttctaatcttgaaaaaaaagttgatgaagcaattaatcatggtttaaaatctgttattctttttgggttacccaaaaaaaaagattcttatgctacagaagcttataatgaaaatggtattatacagcaggcaattcgaactttaaaaaagaaatggccttcattacacgtcatcacagatgtttgtcttt

SEQ ID NO: 2736 - DNA, 200 bp, Lawsonia intracellularis
gtgagtatacaaatcatggacattgtggactactaaaagtagaagatcagtgtgggcatgtaaaaaatgatcctacccttgaattattaactaaagttgctatcagtcatgctgaagctggtgcagacatgatagctccatctgatatgatggacggtcgaattcaagcgttacgttctggattagatcatgctggtttt

SEQ ID NO: 2737 - DNA, 200 bp, Lawsonia intracellularis
atagatatacccattatgtcttattctgcaaaatatgcgtcagcttattatggtccatttagagaagctgctcaatctgctcctcaagtaggtgatcgaaaaagctatcagatggatcctgcaaatacaaatgaagcacttcgtgaagttcaagctgatattagtgaaggtgcagatattattatggttaaacctgcagg

SEQ ID NO: 2738 - DNA, 200 bp, Lawsonia intracellularis
gccatatcaagatatcatccgacgcatgtatgagacatttcctgttccaatagcagcatatcaagtaagtggtgaatatgcgcttattaaggctgcaggagaaaaaggctggatcaacgaacaagctgttattatggaatcccttataggtattcgtcgttctggtgcaaaattaataataacgtactttactgaggacg

SEQ ID NO: 2739 - DNA, 200 bp, Lawsonia intracellularis
ttctaaaaaaaaggtgggtagattcatgagtcttcaagcagaaaaaatatctctagagggacatctttctagaggaaaagatatgtataaaggccatcctcatgaacaattaatgggaaaaacttctgatggaagtggacaccctcatgtaaatggagctcatcctaaaagtgcacatccaggaggtatgcctaggacat

SEQ ID NO: 2740 - DNA, 200 bp, Lawsonia intracellularis
taccagacggatcaccaacatgtaaactaattgcatgggaagtaacacgctcttgtaacttagcttgtaagcactgtagagctgaagctcatatggatccatatcctggagaattttctacagaagaagctaaagctttaattgatacatttcctgaagttggtaaccctattattatttttactggtggtgagccaatg

SEQ ID NO: 2741 - DNA, 200 bp, Lawsonia intracellularis
atgcgtgctgatgtatatgaactcatggcttatgcaacgtccaaaggcttacgttgtgtaatgtcacctaatggaacacttattactccagaaacagcacatgctataaaaaaatctggtgttcaacgttgttcaatctctcttgatgggtacaatgctgaaagccatgattcttttcgtatggttcctggagcttttga

SEQ ID NO: 2742 - DNA, 200 bp, Lawsonia intracellularis
agcttctcttcgtggtattcagtatcttaaagatgaaggggtagaatttcaaattaatactactgtaacaaaaagtaacctcaatgattttaaaaaaatatttaaactctgtgatgaactaggagcttctgcttggcatattttccttcttgtacctatgggtcgagctgctgaaattgcagaacaatccattacagcag

SEQ ID NO: 2743 - DNA, 200 bp, Lawsonia intracellularis
aagaatatgaagaagttttacattggttctatgattttagaaaaacaacctctatgcatttaaaagccacctgtgcccctcattactatagaattatgcgacaacgtgcccatgaagaaggtgttcctgttaatgtagatacctttggtatggatgccatgactcgtggttgtcttggtggaacaggcttctgttttata

SEQ ID NO: 2744 - DNA, 200 bp, Lawsonia intracellularis
agctatgaaggtcaagtccaaccttgtggatatctcactatggattgtggtaatgtccgtgaaacacctttcccagaaatatggaaaaaagccaaaacatttcaacaatttcgtactcagtctgaatataaaggtaaatgtggtgtatgtgaatatcacaaatcttgtggtggatgcagggctcgagcttggagtatgga

SEQ ID NO: 2745 - DNA, 200 bp, Lawsonia intracellularis
tggtgatcatatgggtgaagaaccgctttgtacatatcaaccaaaacgctatttaaaacaaaagaattcttctcaacctattgatcatcaaggcattacaccttgtgctcgtggccatatgggataatcctatggataatattgataaaaaactattagatattatacaaacaggatttcctattgttccaaggccttat

SEQ ID NO: 2746 - DNA, 200 bp, Lawsonia intracellularis
gctgagattggagaaaaacttggaataactgaagctgaagcattaagtagagtacgagctcttaaaggaaaaaaaattatccgtagattaggtgctaactttcaatcttccaaattaggttttcgatccacattatgtgcagcaaaagtacctgatgaaaaaatggaattatttacaactgaagtcaataaacttccagg

SEQ ID NO: 2747 - DNA, 200 bp, Lawsonia intracellularis
agttactcataactatatacgagatcatgtttataatgtttggtttacattaataggtccttcatgggaagaagtatgttcaacgcttgatggtgtaacagagcgaacaggtataaaaattctcaatttacctgctactcgtatgtataaaattcgtgtagactttcgtatggatgatgaataaattaattatcaataat

SEQ ID NO: 2748 - DNA, 200 bp, Lawsonia intracellularis
atcaataaatataaaggtgctctctagtagtagggagcatttttttatgatacataaaaaactcttaaacttttgggagataataagataactaactattaattatcataattatcattaagagatatttttaataaggagtaactatgcattatccctttaaaaatattatacatttattcataacattagtgattagt

SEQ ID NO: 2749 - DNA, 200 bp, Lawsonia intracellularis
gtatgtattggatgtacttcatataaaatttctgagaaatatccatatatagatggtgctgttattgaatattctaataatgttgggaataatgctaaagctgaaaaaattgataatggtatgtttataccagatgggaaaggtggatccatatggatacctggctcaaatcctcaaggtccgaatgaagcatttattca

SEQ ID NO: 2750 - DNA, 200 bp, Lawsonia intracellularis
agctcaagagttacgtttaaaagtaagagagcttgcatcacaacttcttgatacacaagacagtagttctttgattggtctaatagcattaccaacttcttttgttaatttgaataatttttcagaatcaagtccattgggtcgctatatgtcagaagctatgatttatgagttcaatcaacgaggatttcctattaaag

SEQ ID NO: 2751 - DNA, 200 bp, Lawsonia intracellularis
aatatagaatagatactaaaatttctatgagtgaatcagtcggaggtgaattctctcttcaaagaaatctaccagcactatctgttaagcaacaatgggctgcaattcttgttggaacatacctaagagaaaacaatgctgtttttattaatgtaagacttgtaagagcaaaagatggaatggtattacgtaccgctcaa

SEQ ID NO: 2752 - DNA, 200 bp, Lawsonia intracellularis
attgttcttccacaaaatgcactactttcaaatatgatatcgccaccattatcttcaggtatcttatatattggaccacaggaaaataatacatctatatctaaatttaaccctactagttcttctcaacaagaacaacaactagttaagccttctgtgaaaactcagcttgctcaagatacacaagaaatgaataatca

SEQ ID NO: 2753 - DNA, 200 bp, Lawsonia intracellularis
gcttgagcaaaaagataataataataataataataataataagataactaaacagatacagtctaactctctagaagagagtagctcaaaagcaacaatatctcctccagttcctgggatgcctaataatctataataaagtgagaagattatgcataggttgttattcttactgtgtatctgtattattacaataaatg

SEQ ID NO: 2754 - DNA, 200 bp, Lawsonia intracellularis
tagggtgtacaaaaattatgtatgttccagagtcttcagaaacactccataattggcatcttgctagagaatatcaaagacaacaacggtatgaacttgctagacaatactatatattggctttagctggagcaagagaacctcaatctcaaaaaactcttcaacttgaaataaaagctgtagacagaatgatagaagct

SEQ ID NO: 2755 - DNA, 200 bp, Lawsonia intracellularis
atgcgttgaatattcttcatatgttatcgggagttattattatgttccgattactatttatttttatttttagtataactttccttttacccaataaagtattagctactactagtggaacaatccctactgctgctgtaacaataagtgaacaattagatgctcaacttcttcgtagaattggaaataatctttataat

SEQ ID NO: 2756 - DNA, 200 bp, Lawsonia intracellularis
aaatcctctatatctattgtggtaaccccagctgtacttcttgaagatttatcaaaaagtagccctttagcaagacaactggcggaagagattacaaagtgtttagttcaaaatggatattctgtcacagaaatacgcaaagctagtaaaatcattatagataaaacaggtcctaaaattcttactcaagacccatcaca

SEQ ID NO: 2757 - DNA, 200 bp, Lawsonia intracellularis
gcttgcaacaactcaagtagaagcagtagctatacttacaggaacctacactgttacaaaaaagaatgttagattcaatataaaactattacatataccaacaaatgatgtcttagccacagcgtcaacaacaataccaattactaaagaaatttatccattattagtagataaaaatactaaacctggaacaccaagtg

SEQ ID NO: 2758 - DNA, 200 bp, Lawsonia intracellularis
taactacaaaactacaataaatattttttcatcaattaccaatataaataatatattaattttctattgtcatagtattacttatttctataaaattaaaatataaataacactatatttatagtagctatatacaattgatatattatatagctagactataaaaagtctaagtaatttttatatataattattaggta

SEQ ID NO: 2759 - DNA, 200 bp, Lawsonia intracellularis
aaattaatttttataattaaagagaagataataaaataatactttataaaaagtatataattattttactaaatatctagtaacaagcctatatcttttaaaaaatgtatacattttttaaaaattttttctaaaaatatagttatattatatagttgcaaggtaacgctatatgttatctttcaaagcttacttcacct

SEQ ID NO: 2760 - DNA, 200 bp, Lawsonia intracellularis
ataaatcacatgttaattattttgtgatatcttaccatatgttgatgtcacacgtcgtgaagctagtcctgtagtagatggggaaggtattgtaagttccttttatttatttaattcttcttgagctttgtgttgagcagctacttgagcttgtgtacctgtaatttgttgtgttttataagcagactgggccaatgatt

SEQ ID NO: 2761 - DNA, 200 bp, Lawsonia intracellularis
tacttgctcctgtaggatgttgtgtccttgtaattggtacaggagaaccactactttgttgggatactgataacttagatgcaatttcagcagctgcagcttttgcttcaggtgtattaagaatttcagcatatgctgaacgtaagcctgcaagaacatctatgacactatctattaacttgatatctaacttaagattt

SEQ ID NO: 2762 - DNA, 200 bp, Lawsonia intracellularis
gcttgaaggagtcgagtagtacaaaggacatagagattatgcaaattttctgcaatttctcctccaagattcatatttaatgatgattctaactcactaataacatcaagtgctttagaaataagtatcccttttgcaccaaagtctttctctaaaattttctctttagcttgattaagaaactttattgcaccatcata

SEQ ID NO: 2763 - DNA, 200 bp, Lawsonia intracellularis
taaaagaagaagaacttctccttgaccagtcgtattaaactgagcttctacatacgcctgagttcccttaatcataacaagtttctcctagatgctaaaaaaagtattatgcaccaagttgccctaaactagaagcatttgctgacatcatctgattatattttgctaatacagcatcaagtctagaaaattttaaacgc

SEQ ID NO: 2764 - DNA, 200 bp, Lawsonia intracellularis
atcatacgttcccaactagtaactctttgtgtttctttttctattcttgtctcaagatttttcataacatccttatagttatcttgcatgataattaaaggacctgtgttttcttttaaaggatcttgctgtacttcagctttaagtgcttcttgtatttggctaagtttaccttgtttgactcttacagtactttctac

SEQ ID NO: 2765 - DNA, 200 bp, Lawsonia intracellularis
attgatacctggagtacgattattaactgctatactaagacctgtagcaggaccagatgtgaccgtatatatattttttgcaggatcagatagagaagcttttacacctccaatgtaaacgtctcctatagtaccacttgcatctacagaatactttacatcatatgtaccagcttgtgtttttccaacaatatgatctt

SEQ ID NO: 2766 - DNA, 200 bp, Lawsonia intracellularis
gataagaaaaatctgttgaatcagatattccagaactaccagctaatatatctgctactgcttgtggatctttttttaatgcctcatcaagagttgtataaggtgcatcaggaccaattgtttctctatctaaaattttaagttgtccaaaagtttcactaccctcatcagcatctacgacaataccaattgaagcaagt

SEQ ID NO: 2767 - DNA, 200 bp, Lawsonia intracellularis
gatgaaaatagatcccctggaccatcttgtgtttgtttaggagaaaaacctagaccattagaagaaaagatagacttaagtctagtactaagcatttgtatgccagtatcacctgtaaatagtccagccttcacttttgtaggactttgtaaatatgatggaattttacttgaagaactagaagtgtctttactatcatc

SEQ ID NO: 2768 - DNA, 200 bp, Lawsonia intracellularis
tttgtcttcagctgttgctttagttaactcttgaattttggaaagaacattatttatagactctactgctttctcaacttgtttttttacttcgtcagtagaagtctgaattgtaatttgtgttttcccttcggaaagtagtgtaatttgaagtcctgggataacttctgtaagttcatttgtagaagatgtaagttctt

SEQ ID NO: 2769 - DNA, 200 bp, Lawsonia intracellularis
ggtcccaaccattaatattaaaaatagcatcttgagaatcacgtttattccagcctgcttgacccgaagatgtgaaacttccaagatcagtagggctagcggttactttaacttgttgattaggaactgttccttctaattgcaatactatatctgagccatgtttttcaaaagttgcacgtactcctgtattttttgta

SEQ ID NO: 2770 - DNA, 200 bp, Lawsonia intracellularis
ttttcatttatagctgtttggagttcttttgctgttgttcctgaaggaatatcgaaagtaaatgttcttccattgtattcaaaagaaaattgttgagttgttcctgaagtattaataattgtatcttcaccattagctaatgcactgctggtagcaacagatgctttaaagtctggaagcgttgtcttatttgaaataga

SEQ ID NO: 2771 - DNA, 200 bp, Lawsonia intracellularis
taaagtcgcatttgcaccagtttcagttccttcaagactaaacatatagccatcgccagtcttgataaggtttgctttaacaccaggattattagaatctttgtttattaatgttgcaagatattcaagatcactacctggaggaacttcaacttcatgtagttcccctttatactcataagcaaagataccaggtgaac

SEQ ID NO: 2772 - DNA, 200 bp, Lawsonia intracellularis
ctgtattattaatactttcagttttagaatcaaaaatatgattattagaaagaatcgtgtttgttgcaagctgtttcacatcaattgtatgtgttccatcagatgcatcagaacttgccttaacgcttgcaacagaagtatttgaaacagaaccttctttttttaaaatagcaccaacagaacttagcttacttaaagac

SEQ ID NO: 2773 - DNA, 200 bp, Lawsonia intracellularis
gcttcagtatctttaactgtttttataagctcttcaaatgctttatatttttttgtccattgttcatgggaaactacaagtctatttttaggaataagctcaattttcttaagttgatcaatcatagcttggaaatcggttccactaccaattcctccaaaagaaattcctcctgaaagataatccgccatagttttgtc

SEQ ID NO: 2774 - DNA, 200 bp, Lawsonia intracellularis
cttacaaaaaaattttacctatatgatcctattcagcaaataaagtgccaaatgttattttctttatcggaaaaactttttttatgtttagacatgaaaaagaaaaaaatgcattttaaaagaaaaatacttaatggaggagtgtatcttcttctcgagtaaacattctccaacgtgtacctgttggtgtattttcagga

SEQ ID NO: 2775 - DNA, 200 bp, Lawsonia intracellularis
attactctcaatatagggaaatctttccagctatataccattgaatgatcaggataaacctcacaatgcatatattcagatatagtatgtggtgatagattctttggatcttctccaagttcttcaagctgctcatataaaagttcttcaatacgagctgctacttttttagatatgttatctgacataattattccttt

SEQ ID NO: 2776 - DNA, 200 bp, Lawsonia intracellularis
acctataatgaatgactaccctaacagtatgtattataatgttttttggcaagtagcatcaaaatattatagagatatcttgacagtattattggatagcgatagaaatatttcttcaataacataggcgcgtagctcaggcggtagagcacttccgtgacatggaaggggtcagcagttcaagtctgctcgtgcctacc

SEQ ID NO: 2777 - DNA, 200 bp, Lawsonia intracellularis
atatacttccattattaaagtaaaaagataagttaaccttcaattaaggtaatagttatgcagagtgatataaataaaaatcatcttactatgactgaaggattaacatatattaatgaatcaggtttaaaagaagaagaatcaaaaaatattgttggttacaacattaatggctcaataatagatctttttacacctct

SEQ ID NO: 2778 - DNA, 200 bp, Lawsonia intracellularis
tcctaccataacaaaagaagttatacctatcactattgattcagaagatggtcttgaaatgttacgtcactcagcagcacatatccttgctgctgctgtaaaaaatctttttcctacagtaaaaatatctattggtccttctattgagaatggtttttattacgactttgatgcagaacgtccttttaccccagaagact

SEQ ID NO: 2779 - DNA, 200 bp, Lawsonia intracellularis
ttcctgctattgaagctgagatgcaacgtattattaatgaatctattccttttgagcgtattgaaattagtaaagctgaagctctagaatttttttcttctcttcatgaaaattataaagtcgaaataataaactccttagaagatggtaatattacactttatcgaataggaaactttacagatctttgtaaaggtcct

SEQ ID NO: 2780 - DNA, 200 bp, Lawsonia intracellularis
catgttccaaacacaaattttataaaagcttttaaactactttcagtagcaggtgcctattggagaggtaatgaaaataatcagatgctctctcgtatttatgctacagcatttcctaataaaaaattattaaaaacatatctaacacaactagaagaagctaaacgtcgtgatcatcggaagttaggtaaagagcttaa

SEQ ID NO: 2781 - DNA, 200 bp, Lawsonia intracellularis
tttatttgaatttcatgaggacattgctccaggaatggttttttggcaacctaatgggatgttattacgtactattttagaagacttcttacgtaaagaacacttaaaaagaggatatcaactcgtacaaggtcctcaattacttagacgagaactttgggaaaaatcaggtcactatacaaattataaagaaaatatgt

SEQ ID NO: 2782 - DNA, 200 bp, Lawsonia intracellularis
attttacggaaattgaagaagatgtttatgggataaaacctatgaactgtgtttctcacatgcttctttataaaacacatcttcatagttatcgtgaacttcctcaaagatattttgaactaggtgtagttcatcgccatgaaaaatctggtgtattacatggactcttaagagttcgccagtttacacaagatgatgca

SEQ ID NO: 2783 - DNA, 200 bp, Lawsonia intracellularis
cacattatttgtatgcccgaacaacttgaagaagaaattattcaagttattacttttgtccgtgaccttatgtcactatttgactttaattaccatattgttatatcaactaggcctgaaaaaagcataggttctgactatgcatgggaacttgctacttctgctttaattcaagcagttgaaaaaataaatcttccata

SEQ ID NO: 2784 - DNA, 200 bp, Lawsonia intracellularis
ctctattaaccatggagatggagcattttatgggcctaaaattgatataaaagttactgatgctattggtcgtgaatggcaactttcaacaatacaatgtgactttacattgccagagcgttttgagttagaatatgtaggtcaagatggaaaacgtcatcagcctgtaatgattcatagagctatttttggctcaatag

SEQ ID NO: 2785 - DNA, 200 bp, Lawsonia intracellularis
aacgctttattggtatattaacagaacattatgcaggtgctttccccacatggttaacacctatacaagtaaaaatattaactgttactgatgcacaaacaccttttgcaaaacatgtctatagtcaactacaggatgtaggtattcgtgtaggactagacattcgtaatgaaaaattaggttttaaaattcgcgaagca

SEQ ID NO: 2786 - DNA, 200 bp, Lawsonia intracellularis
caacttgctaaaattccttatattcttgttatcggacagaaagaattagaattagaaagtgtaaatgtacgattgcgaacaggagaaaatattggtatgcagtcagttacagagtttattaaacttgttgaaaatgactgtatacaaccgttcaaacgtggagggatgaattatcgcttctcttaatattaaacctcgta

SEQ ID NO: 2787 - DNA, 200 bp, Lawsonia intracellularis
gagaggtttcccaagatggagtatgccgtaatgagcaaatttttgctcgagaagtgcgggttattggaccagatggtgagcagcttggtattttagaccgtaatcaagctattgctattgctaaagaacatggccttgatcttgttgaagtagcagcaacagcagatccacctgtatgtcgtattatggactatggaaag

SEQ ID NO: 2788 - DNA, 200 bp, Lawsonia intracellularis
tttaaatatgaggcacaaaaaaagaaacaagaagctaaaaaacgccaaacaatagtccaaattaaagaaattaaaattcgtccaaaaactgatgaacatgactttgaaactaaagttcgacatattaaacgttttttagaagaaggtgatcgtgttaaagttacagtctttttccgtggacgagaaattgtacataagga

SEQ ID NO: 2789 - DNA, 200 bp, Lawsonia intracellularis
tagaggaattgtaattttagaacgaattatacttgagacaaaagaagtagggaaggtagagcaggagccaaaagccgaaggacgtacacttcaaatgttacttgcccccttgcctaaaaaagctgtataaatatgactataactcataaaccatatagttactataatacaactaaacatattttgatttcattaggaga

SEQ ID NO: 2790 - DNA, 200 bp, Lawsonia intracellularis
aaagatattatgcccaaactaaaaacaagacgttctgcagcaaaacgtttttcttctacaggaagtggtaagtttaaacgccgtagacaaaaccttagacatatccttacaaaaaaatcacctaaacgaaaaatgcagctagggcaagttactattctagctccaagtaacgttaaagcagttcgtcgtatgatgccata

SEQ ID NO: 2791 - DNA, 200 bp, Lawsonia intracellularis
tgattgttagttctgttttaatggtttatgatacatttatatcacaagtagatcactttttagtttacttttagatagtaaagaaataaaggaattatcatgcgtgtaaaaagagggttttctgcccatcgtcgacataaaaaatatttagaaatggcaaaagggtttcgtgggggacgtagtcggctgtatcgtactgc

SEQ ID NO: 2792 - DNA, 200 bp, Lawsonia intracellularis
acgtgaagctgtagaacgctcattagtttatgcatatattggaagaaagcaaagaaaacgtgaattccgtaagctttggatattacgtattaatgctggtgctcgtgaacatggtctttcttattctaaaatgatggcaggattatctcaagctggaattatgttgaatcgtaagatacttgcagagcttgctgttaaac

SEQ ID NO: 2793 - DNA, 200 bp, Lawsonia intracellularis
aaaaagaagactttgctaaactagtagaaattgctaaaaatcaagttcattaattataataacaatattacttattaacaaaagtagttaaagaataaagtaatagttatcaaattagatataaaaagttaattgaatggacctaattaaggaatttgaacgcctgataccagaaattaaaaaaaatctggaacaggcgt

SEQ ID NO: 2794 - DNA, 200 bp, Lawsonia intracellularis
cttcattagaacatattgaacaaataagagtagcttttttaggacgaaaagggcaacttgctgcacttatgtcaaaaataccttcagtagatacttcactacggccagtagttggagaaactgcaaatagtgtaaagaatcaacttactcaacttattcacgaatacaaaactcagcttgactttctaacaactactaat

SEQ ID NO: 2795 - DNA, 200 bp, Lawsonia intracellularis
cgtatacaaaactttgatgcaggccttcctgggaaacgaccttggtatggaacactacacccaattacaattgttttagaagaaatttgttcagtatttactagcttaggatatactatagcaacaggtcccgaagtagaaacagaatatcataactttgaagcacttggtataccatcggaacatcctgcaagagatat

SEQ ID NO: 2796 - DNA, 200 bp, Lawsonia intracellularis
gcaagatacattttatatttctgattctatcctattacgtacacatacatcttctattcaaatacgtaccatgttaaaaaaacaacctccaattgcaattattgctcctggacgagtatatcgtagagactctgatgttactcatacacctatgtttcatcaaatagaagggcttgttgttgataaaaatatatctatgt

SEQ ID NO: 2797 - DNA, 200 bp, Lawsonia intracellularis
cacatctacgtggtacattaacagcatttctaaaaacaatttttggcgctgaaataaaaattcgattccgtccaagttttttcccctttacagagccaagtgctgaaatggatatttcatgtcacccttgcaataatactggctatgtaaaaaatgaaatttgtcgtatttgtaaaggaagtggatggattgaaatcctt

SEQ ID NO: 2798 - DNA, 200 bp, Lawsonia intracellularis
ggctgtgggatggtacatccaaaagtttttgagtctgtaggatatgatcataatatatactctggatttgcttttggacttggtgttgaaagaatagcaatgttaaaatatcacattgaagatctaagaatattttttgaaaacgatctacgctttctacgtcaatttatgtaaatataagctagatagtataagtgata

SEQ ID NO: 2799 - DNA, 200 bp, Lawsonia intracellularis
tgaaaggcacaaaatgttattaagtttaaactggttacgtgaatttgttccatatgaaggaactgctcaagagcttggtaatagactaacaatgcttggatttgagcttgaagatatcataacaccatataataacattcaatccattatagttggaaaagttgttcattgtgaaaaacacccagaagctgacaaacttt

SEQ ID NO: 2800 - DNA, 200 bp, Lawsonia intracellularis
ctatttgtactatagatattggtcaagaaacattactacatgttctatgcggtgctccaaacgtagctacaggtcaaaaagttcctgtagctactattggtactactatgcctgatggtaccattataaaaaaaattaaattacggggcatagaatcttttggaatgatatgttctgaaaaagaattagaatttacagat

SEQ ID NO: 2801 - DNA, 200 bp, Lawsonia intracellularis
gatcattcaggaattttagttcttccagaagaactaactgttgggacatcactagtgaatgctttaaatcttgatacagaaattctaaaaattagtattacaccaaaccgaggagattgtttatctattttaggacttgcaagagaaatttctactgcatttgggctaccgttatttcctcagcaacctatccatttcct

SEQ ID NO: 2802 - DNA, 200 bp, Lawsonia intracellularis
agaagtagagcctgatttttcaaaaaattggtctgtccatgtttcttctaaaaaagtatgctcatcatatctattacgtttagttgaaaatatatccgtacaaaaatcacccttacatattcgccatagacttcactcaatgggtattcgtcctatttctaatgttgtagatatcacaaattatatcttactagaattag

SEQ ID NO: 2803 - DNA, 200 bp, Lawsonia intracellularis
gccaaccacttcatgcctttgataaagatcttattgaaggtaatacaacatatatctctttagcaaaagaagaagaaatactttgtactcttgacggaaaaaatcatacattaactccatctgatttaattatctatgatgatactaaacctattgcactagctggtattatgggttgtcaaaactcaaaagtaacagaa

SEQ ID NO: 2804 - DNA, 200 bp, Lawsonia intracellularis
gcaacaaaaaatattcttattgaaagtgcagtatttaatcccagtataattagaaaaacagctcgacggcttggtatttctactgaatcttcctatcgttttgaaagaggtgttgattcatctggagcgatgtatgctcttaataaagccattaaaatgattattgatacaagtggtggagaagtcaagataggtaatgc

SEQ ID NO: 2805 - DNA, 200 bp, Lawsonia intracellularis
tcactatgaacctacaccttataaacaacctattatccaacttgatacatcaaacatacaaaaagtaacaggtacttctattccttctaacttctgtatcaatacactgacacaacttggttttgaaatagacacttctaactgtaatatatgggatattactataccaagttggagaaaagatattcaacattctgtag

SEQ ID NO: 2806 - DNA, 200 bp, Lawsonia intracellularis
atcttattgaagaactacttcgattttatggactaaatactatacctgaagaacttccatgtatttataaatcactaaatgacataggattaccagaatctcagtatcagtttattacaaaagttaaacattgggcttgtggaataggacttaatgaaactgaaaattatagttttataggaaataacgagttagatttg

SEQ ID NO: 2807 - DNA, 200 bp, Lawsonia intracellularis
cttaaattttctaataatactagacttattatatacaatccccttacagaagagcaaaatgtacttagaacctcacttatacctagtcttttaaacaatgtgaaatataatgtagctcatggaaatactggattaagattatttgaagttgctaatacatatacatttgaagcaatatcagaaacaacagcaaaagaagt

SEQ ID NO: 2808 - DNA, 200 bp, Lawsonia intracellularis
cctaaaactaggcatagttatgcatggtgatttatttgatacaggttggcctcaaccttctactagcgcctcttatttagatcttttaggtattgttgaacactttataacttttttacatttaccacccctgactacttcacaaactgatacttatgcatttcttaaccctggagttgatctttttatccatgggaaaa

SEQ ID NO: 2809 - DNA, 200 bp, Lawsonia intracellularis
aaattggatatattggctgtatatctcaacatattgcaaaaaattgccatacccataaagaaatatggattactgagcttgatttagaaacattagctcatttatataaaaatataaaaataacatttaaaccattaccaatttatccatcttcttatagagatatgactcttattattacttctaatacttctatctca

SEQ ID NO: 2810 - DNA, 200 bp, Lawsonia intracellularis
aacataaaaagttatatggacttaatagatattcctatattagaaaacattttcttattagatatatttagacctaataatatagaacaacattgtacgtttcgtttcgtttttagaagtgctaaaaaaacactcaaggatagcgaaattgatttggcttataaaaaaatcactgaaatactatccaatcaatgtaatat

SEQ ID NO: 2811 - DNA, 200 bp, Lawsonia intracellularis
aagatttaatgtattacttgaataatatttaatgacaatgtaagatatctagaggtaggtacgtaatgaatgaacgattatataaaatcggtgaagcagcacgtatacttgaacttgaaagttatatcttacgttattgggaaacagaattttctcaactttctccaaaacgtacgccaaaagggcagcgtttatattca

SEQ ID NO: 2812 - DNA, 200 bp, Lawsonia intracellularis
gaaacagatataaaacttcttttcaggttaaaatacttactgcatgaacaaggactaacaatagaaggagcacgtcgagtactttctggtgactcagctttactgataacaccacaaacaaaaaacaaaaatgaaactaagtcgattaaaaacgaaacaacaatatttaaagaaaaagaagaaatggaaaaattattaga

SEQ ID NO: 2813 - DNA, 200 bp, Lawsonia intracellularis
tacaattaaaacagttgaaaaagaactcttatatataaaacaactacttaacaaatcttcaactttttcattatcctgctaaagccctagagttttatactatgattctttcgccttccctcttatctgctaaaatagggagccttgaaactgaactccatgaattagaagctgcaggacttcaatgggtgcattgggat

SEQ ID NO: 2814 - DNA, 200 bp, Lawsonia intracellularis
gtcatggatggacactttgttcctaatataacatttggacaacacgttattcagcaacttcgtccttgttcatctctattttttgatgttcatcttatgatctcatctcctgaacgttatatttcaaattttcatactgctggagctaatttacttgttgttcatgttgaagcaactatacacttacaacgagttgtttc

SEQ ID NO: 2815 - DNA, 200 bp, Lawsonia intracellularis
tgaaattcatcgacttggaatgaaagctggtgttgctctaaatccttctacctccttatcagtactagaatatattttagatgatattgatttagttctccttatgagtgtcaatccaggttttggaggacaacatttcctttcttctacttatgaaaaaatatacaacttacgcaggatgattgatgaaagagaaaaaa

SEQ ID NO: 2816 - DNA, 200 bp, Lawsonia intracellularis
caatccttattcaagtggatggtggagtaactttatctaatacaaaagcattactagatgcaggaactgatgtttttgtttgtggttcttcattttttgtaggagaatcttactcagagaaacgatatcaatttgaatctgttgccaatagtctaaccatttaatcttcttacaacatctcttcatggaaaaaaatatac

SEQ ID NO: 2817 - DNA, 200 bp, Lawsonia intracellularis
catctcgtaaagaattagctaatgtcttgcgtatcctaacaatagacgctgtagaaaaagccaactctggacatcctggcgcacctatgggaatggctgatattgctgaatcactatggcggtgctttcttaaacataatccttctaatcctcaatggattaatagggatcgttttatactttctaatggtcatgcttca

SEQ ID NO: 2818 - DNA, 200 bp, Lawsonia intracellularis
atgctgctttatggagtattacacctttctggttatgatttatcaatagatgatattcaaaactttcgtcagcttcactctaaaacaccaggccatcctgaatataaatgtacaccaggtgtagaagtaacaactggcccattaggtcaaggcttagcagtagctgttggtatggcaatggctgaacgtttattagctac

SEQ ID NO: 2819 - DNA, 200 bp, Lawsonia intracellularis
aacatttaatcgtgaacactttcctattattgatcattatacatatgtttttgtgggcgatggttgtctaatggaaggtatttctcaagaagcttgttcatttgctggaactcatcaccttggaaagcttattgttttttatgataataatggtatttctatagatggaaaggttaataaatggtttactgatgatacac

SEQ ID NO: 2820 - DNA, 200 bp, Lawsonia intracellularis
ctgctcgatttaatgcttgtggttggcatgtcattcctaatatcgatggccataatgcagaagctattgattctgccataatacttgctaaaagtataacagataaacctacacttatttgttgtaatacaatcataggatatggctctccaaataaatcaaatagtcaaagttcacatggtgcaccacttggaaagagt

SEQ ID NO: 2821 - DNA, 200 bp, Lawsonia intracellularis
gagtgtgatgctgttagaacagaattacactggaagtcagaaccattccaaatcccagaacaaatatataaagcatgggattgccgtaaaaaaggaactatgcttgaaaatgaatggaatgaactctattcaaaatattgttcaacatacccagaactttcttctgaacttgaaagaagaatacaacacatacttcctga

SEQ ID NO: 2822 - DNA, 200 bp, Lawsonia intracellularis
gtgctggaattcgctaacaacatcttacttacaagaaatagaacaaaataaaatagctatagctactcgagtagcttcaaaaaacactttagatattattgctccttgcttaccagagcttattggaggttctgctgatttatctggctcagttggaacaatccatagccacactaagtatatctgcaatttatcatatg

SEQ ID NO: 2823 - DNA, 200 bp, Lawsonia intracellularis
atggaaactatctctcatatggagttcgtgaatttcttatgggttcaatcatgaatggcatagcgcttcatggaggatttattccttatggtggaacgtttttagttttttcagactatgcaaaagctgctatccgcctttcagctatgatgaatcagcatgttatttggcttcttagccatgactcaattggtgttgga

SEQ ID NO: 2824 - DNA, 200 bp, Lawsonia intracellularis
gaagatggaccaacacatcaaccaattgaacatatcagttctcttcgtcttattccaaatcttaatgtatggagaccttgtgatgctgtagaaacaactatagcatgggaaaagtctattgaatctcaaaaaacatcatgtatcactttaagtagacaaccacttacttatcaaagtcgtacaaaagaacaaatatcaaa

SEQ ID NO: 2825 - DNA, 200 bp, Lawsonia intracellularis
tatacaatatggtggatatatcttatatgaacccacaaaatcaccagagttaattcttattgcaactggctcagaagttgaactagctataacttcagcaattcaattagaaaaagaagggtatgctattcgagttgtttctatgccatgtacatccatttttgattcacaaccaaaagaatacaaagaattagtgcttc

SEQ ID NO: 2826 - DNA, 200 bp, Lawsonia intracellularis
caagtactattcgaaaaagaattgcaattgaagcagctataactgactattggtggaaatatgttggatttgatggtgatgttgttggtatagacacatttggagagtcagctccagcccaaatattattttctcattttggctttacaaaagaacatattatttctaaagctaaaaacttattacaaaaatagtaatga

SEQ ID NO: 2827 - DNA, 200 bp, Lawsonia intracellularis
gtaccatatgaataattaataattgctatctattttttcatatatgcatattaatattgtcacgctatttccagactggttcacttctcctttaaatacagcgttattaggaaaagcaaaaacatctcgtcttatccaaacacatcttatcaatccacgtgactggacgcttgatcgacacaaaaaagtagatgatcgtc

SEQ ID NO: 2828 - DNA, 200 bp, Lawsonia intracellularis
cttatgggggtggcccaggaatgataatgatgttagatcctattgttcgttcattaaactatatttcagaacaatctcaaggacatggacgaattattatgttatctgcatcaggaaaaccatttacacaaaaatttgctcatgaacttgcaaaagaaaaaaccttaactattatatgtggacgttatgaaggtattgat

SEQ ID NO: 2829 - DNA, 200 bp, Lawsonia intracellularis
tatcgtttatcagagctttttcctatagaatctattagggttggagaagctgttattaatggtggggaagctgcggctatgatgcttatagaagcaacatctaggctacttcctggatttataggaaaagaaacatcttatacagaagaaagtttttcaaataatctattagagtatcctcaatatacccgtccagaatt

SEQ ID NO: 2830 - DNA, 200 bp, Lawsonia intracellularis
atatgaaagtatatctgttcctaaagttttacttgaaggaaatcatcaaaaaataaaacagtggcaacgaaaacaatctctcaaagtaacatttaatacctgtcctgagatgttaaataaagctaatctctctacttcagatatggagtttttttgtaataatataaaagaactggctagattaaatttaggacgaaacc

SEQ ID NO: 2831 - DNA, 200 bp, Lawsonia intracellularis
ttcattgtgtattgttgcactatcctgttatgttaggagatcaaacaattggtgcgacatctttgacaaacctagatgttcatgatatagctcgttgtgctaaaacctatggattaggtagtgttactatagtgacgccgcttcaagatcaacaaaatattttagaaaaaattattacacattggacagtaggagcagga

SEQ ID NO: 2832 - DNA, 200 bp, Lawsonia intracellularis
ggaaaatcaaatcctgatagagcagaagcttttaagcttgtgaatatagcatcagacttacaatcatccctagatactattgaaaattatacaggacaatccccattacttattggaacaactgcctgtaaatatggtgtgttactaccttgtgatgtaaaagaaatgctattacaacaaccaattgctcttctttttgg

SEQ ID NO: 2833 - DNA, 200 bp, Lawsonia intracellularis
tactggtcacggtcttacaccagatactttaaatagttgttttggagtattacgtccattacgatggatagataactataatcatcttcctgtacgtagtgctgttgccataactctggacagaattttaggtgatttttactaaatatatagtaggtattcttttcaaaggagaaatagatggacattttcaaaaaaat

SEQ ID NO: 2834 - DNA, 200 bp, Lawsonia intracellularis
tgaacgtgaacaaatgcgactagatattcctagttttaaatcaggggacactataaaagtttattttcgtattgtagaaggggagaaagaacgaatccaagtttttcaaggaaatgttattcgtattcatagaggtacaaccaatgctactattacagtccgtaaaatatctgacggggtaggtgttgaacgtattgttc

SEQ ID NO: 2835 - DNA, 200 bp, Lawsonia intracellularis
ctcttcattctcctttggttgatcatatagaagtcgttagtgagggacgtgtccgtcgtagtcgactttactatcttcgtaatcttagagggaatgctgcacgcattaaacccaaaaaaatttattaacgtctcctatttttttaaataaacatagagggacattaaagtcccttttcttttttggagaagcctgtgttt

SEQ ID NO: 2836 - DNA, 200 bp, Lawsonia intracellularis
caaaaaaaattaaaacaacaacagatagttgttaaacaaagcttaccaataactccccatgagctagtatatgataacttatctttactcactgcaggtcttgatgaagttggacgtggatgccttgctggaccagttgttgctggagcagtcatcttaccagacactatatcaatagatggacttgctgattcaaaaac

SEQ ID NO: 2837 - DNA, 200 bp, Lawsonia intracellularis
aatctcttctaaccgtcgatatatccttgcaaaaaaaatatatgaaactgctattagctggggtattggagttgtttggccaaaagaaatagacgaaataaatatcttacaagcaagtcttaaagctatggctcatgctgcaactgtattaaaaacttttccagaacttcttcttattgatggcaacaaagctatacctc

SEQ ID NO: 2838 - DNA, 200 bp, Lawsonia intracellularis
aaaaattttttatccaatttggttggaactttttaccaatacaacattctatcattaaaggggatgctagtattccagccatatcagctgcttctattattgcaaaaacttttcgcgatactttaatgtctaaacttgataaacgttatcctcaatataatttttctaaaaataaagggtatggctcaaaaacacatcga

SEQ ID NO: 2839 - DNA, 200 bp, Lawsonia intracellularis
gaaatattacaaaaaattggcccttctcctattcacagaatgacattcaaaggcgtcacttctcactagtcgtatccagttatattatatgaaatcttgtgaaattggacaacaaggagaatctgcagctgcattattcctatataataaagggatgagtattttagaacgtaattggagaaaaggtagatttgaaattg

SEQ ID NO: 2840 - DNA, 200 bp, Lawsonia intracellularis
atttagtttgtcaagatatcaaaacattggtatttgttgaagtcagaactagaaaagcaaaaggaatgctactacctgaacaaacattaactatatctaaacgttgtaatattattcatagcgctcagttatatcttatggataaaaaagattggagtatgccttgtcgatttgatgtaatttgtattatatcaaaaaaa

SEQ ID NO: 2841 - DNA, 200 bp, Lawsonia intracellularis
acaaccctagaattggaacactataaaaatgtctttgaattctacgaaattatggatagtagcaacacctcttggcaaccctggtgatttgtctattcgtgcaaaatctgtattagaatctgttgatattgtccttgctgaagatacaagacgtgctggattgctttgtcagcattgtaatatagtagttaaaaaatttc

SEQ ID NO: 2842 - DNA, 200 bp, Lawsonia intracellularis
ttagttttcatgatcataacgaagaaaaaaaacttaaacctcttcttacaatgttatctagtgggaaaacgttagccttaatttctgatgcaggtatgccaattataagtgatcctggatattgtttagtaaatgcctgtagaaaagcttcaataccagtttcagtagttccaggtccttcagcaccaataactgctctt

SEQ ID NO: 2843 - DNA, 200 bp, Lawsonia intracellularis
gtaggttctggaattataccacatccttttacatttttaggatttttgcctagagatttcatagaacaagaaaaaattttttcttcatttattatgctgtcacacacactcgttttttttgaacgtaaaaatcgattaattaatacattaaaaaatgcttatacagtccttggtaatagagaagtatgtattgctcgaga

SEQ ID NO: 2844 - DNA, 200 bp, Lawsonia intracellularis
gcttaccaaactacatgaagaatttcttttttttaaccttggagaagaagttacatttaaaaacttactaggtgaacttactgttattattagtcctccaaaagaaaaacatataacagaacacagcatattatataaaataataacagaagaaaaaaaatatggtgggacagctcgtgaagttgctaaaagagtacaaa

SEQ ID NO: 2845 - DNA, 200 bp, Lawsonia intracellularis
cacgtacaatgggctggacgacaaagcagatttacagcatcattacatcaaggagctaataatgtctgctaaaaaaaatagtcatcttgtatttgaaaatagaaaagctagacatctttatgatcttcttgattttcttgaagcaggaattgttcttacaggccctgaagtaaaaagtttacgatcaggccatgcaagtt

SEQ ID NO: 2846 - DNA, 200 bp, Lawsonia intracellularis
ttcaagatagttatgtcgactttaaacaaggtgaaggatatattgtaggacttcatatccctccatataataatgcaggttatgttatacaaaatcctgatagacctcgaaagttacttttacatcggcaagagttgaagatgttagcttcaaaagtagagcaaaaaggacttacaatagtaccattaaagctatacttt

SEQ ID NO: 2847 - DNA, 200 bp, Lawsonia intracellularis
aaaaatagaaaagtaaaaacagaaattgcattggctaaaggacgaaagttatatgatcatcgtaacgaactaaaaaaacgtgcagaagctatggatattaaacgtgagttagctgctcgtcatttataaattggaagtaaggagttttcatgagtagtgaagcagaaaaaattatttattctatgattcatgtttccaaa

SEQ ID NO: 2848 - DNA, 200 bp, Lawsonia intracellularis
cgtcatgggcaacgtgaagtattaaaagatatatctctttcatatttttatggagctaaaattggtgtacttggactcaatggttctggtaaatcatccttactaaaaattcttgctggagtagatcagtcatttgaaggagaaacagttttatctccaggttatactattggataccttgaacaagagccacttataga

SEQ ID NO: 2849 - DNA, 200 bp, Lawsonia intracellularis
tgaaacacgtacagttcgtgaagtagtagaagaaggagttcaagaacttgttaatctaattaaagaatttgaatctattaatgcaaagtttgctgagccaatggaaccagaggaaatggatgcccttattgaaaaacaaggtaaagtccaagaacttatggatgcaaaaggagcatgggatcttgactcaaaactagaaa

SEQ ID NO: 2850 - DNA, 200 bp, Lawsonia intracellularis
tggctatggatgcattacgttgtcctccaggagatacacctgtttctgttctttcagggggagaacgtcgtagagtagcactatgtagactattattacaacttccagatatcctcttacttgatgaacctacaaaccatttagatgctgaatcagttgcctggcttgaacattttttacaaacttttccaggtacagtt

SEQ ID NO: 2851 - DNA, 200 bp, Lawsonia intracellularis
attgctgttacacatgatcgctattttcttgataatgttgcaggatggatacttgaacttgatagaggtaaaggaatcccatggaaaggaaattattcttcctggttagaacaaaaagaaaaacgactagcaaaagaagcaaaagcagaaaaagaacgaataaaaacattagcacgtgagttagaatggatacgcatgtc

SEQ ID NO: 2852 - DNA, 200 bp, Lawsonia intracellularis
tccaaaaggtcgtcaatctaagagtaaggctagaattcatgcatatgaagctatgcttaaccatgaaagcgaaaaaagagctcctgatttagaaatttatatcccaccaggaccacgtttaggaaaaactgttattgaagcaagaggtacaacaaaaagttttggagatcgtctccttattgaagatgcacattttatta

SEQ ID NO: 2853 - DNA, 200 bp, Lawsonia intracellularis
tcccttctggcgcaatagttggtattattggtcccaatggagctggtaaaacaactcttttcaaaatgattgcagggttagaaaaaccagatactggtgagtttcttataggggatacagtagtattaagttatgtagatcaaaatcgtgaatcattactaccaggtaaaacagtatatgatattattagtggtggccaa

SEQ ID NO: 2854 - DNA, 200 bp, Lawsonia intracellularis
gaagttattagacttggaaatcgtgacataaatgctcgtgcctattgttcacgttttaattttataggttcagatcaacaaaaaagcgttgatgttttatcaggaggagaacgtaatagggttcacttagctaatatgttgaagtcaggtgctaatgtcattcttcttgatgaaccaacaaatgatcttgatgtaaacac

SEQ ID NO: 2855 - DNA, 200 bp, Lawsonia intracellularis
aatgcgtgcacttgaagatgggttagaaaactttgcaggttgtgtattagtgattagccatgatcgttggtttcttgatcgacttgctacacatattttagcttttgaaggtgattctaaggtgtctttctttgaagggaattattctgattatgaagaagataaaaagaaacgtcttggaaaagctatggagcaacctc

SEQ ID NO: 2856 - DNA, 200 bp, Lawsonia intracellularis
atagaataaaatttagaaaattaacacgttaaaataactatagactctaattagagtaataacataacaataaaataaagttttttattataactcttagaaaaaagaaaatattaaattatatctaaacttttttgattattagttgttactctaatagtctaagttaatgttaaagaattatttgaagtaaaacaagt

SEQ ID NO: 2857 - DNA, 200 bp, Lawsonia intracellularis
aagagtttttaaagaatctatagagtgaacactaatattattatctattgtagatatatgttcttccaaaataggagtaaccatacgtgataaaacacctttagggccgacttctatccattggcgggtaccatctttccactgatttgtaataacattaatccaatggacaggtgatatcatttgatttagaatagaat

SEQ ID NO: 2858 - DNA, 200 bp, Lawsonia intracellularis
cataaatactttttgtatctacaaagggagtacctgtactgttagtatagatagggtatagtggtgtagaccaattcattttagataatttttctgaaaatttctgtgaagctttttccataagtggactatgaaaagctccactaacaggaagtaatacagcacggcctcttttttcttttacaaaagaaatagttgct

SEQ ID NO: 2859 - DNA, 200 bp, Lawsonia intracellularis
tctatagcttctcttgttccacttacaacaaattggacaggagtattatagtttgcgattgttatagattgttgtatgttatgagatacatctttcacaatacattcaacttcagtttggctaagacgaagaatagcaatcattgctccctgttcactaggttctaaatttgacattaattccccacgtaaacacacaag

SEQ ID NO: 2860 - DNA, 200 bp, Lawsonia intracellularis
ttcaagcactgattcaaaggataaaacttttgctgctgctaatgcactaaactctcccaagctatgtccagccacacaacctggcacaaggtgtttagataattgttgccaaattgacatattcactacagttaaagctggttgcaaatattgtgtatctgacatcaaagttgtatcattgctttcccagtacacagctc

SEQ ID NO: 2861 - DNA, 200 bp, Lawsonia intracellularis
ggagaggtagtttactaatagattctgctttttcccaaaggctcatcatttcttttgaagattctgctatatcacgtcccatattattttcttgtgagccttgtcctggaaaaagaattgcaataggatttttcattataattacctataagtggggttaacttaaaaatactaaaaaagaaaaaagaaagaatattaaa

SEQ ID NO: 2862 - DNA, 200 bp, Lawsonia intracellularis
aaaatattaattataaccaattgaactgattttcataagtttttcccaattatgtgaagattgtatgtgacgaacagtacctgttttacttctaatagcaatagagtgtgtggttgcaccctgcccatgaaactgaacaccatggagaaatgagcctcctgaaatacctgtagcagcaaagaaaacatcatctgctttta

SEQ ID NO: 2863 - DNA, 200 bp, Lawsonia intracellularis
ctaaatcatcaacttcaagtagttttgataaatctattccagcattgtatagagactgtttttcagtttcagtctgaggatctagtcttgcgatcatccctccaccaatacctttaattgcacaagccgaaagaacaccttcaggagttcctcctgttcctatcataagatctatctcagatctgggatctacagctaat

SEQ ID NO: 2864 - DNA, 200 bp, Lawsonia intracellularis
agtgcacctgcgacgtcaccatctgtatgaagttgtattcgagcgcctgctgtacgaatatctgtaataagttgtttatgccttggtttatctaatacaaataccgtgagatcttttatatctttcccaagagccttagcaatatttttcaaatttgtttctacaggtgcatctagatcaataacattttttgctgactg

SEQ ID NO: 2865 - DNA, 200 bp, Lawsonia intracellularis
actcacaactaacttttgcatataaaaacttggaccaggatcatacatacttcctgcaggagcagctccaactactgcaatagcatttggtctaccaaatgcaaggagatttgttccctctacaggatctacagcaatatctaaagggtatccataacctaatccaacttgttcactattatacaacataggtgcttcat

SEQ ID NO: 2866 - DNA, 200 bp, Lawsonia intracellularis
ctttttcaccttcaccaataataatagtccctatcataggaagattattaaaagaaagacgcatagcatcaactgctgctttatcaccggcatttttatctcctcttcctagccaacgagcagcagaaatagccgcagcctctgtcactctgacaagatcaaaggctaaattacgctctagtgtttctatagatgacatc

SEQ ID NO: 2867 - DNA, 200 bp, Lawsonia intracellularis
atttttctccacgataagataactgttgcaaaacaaatatacataaaaagattacatgagagatatatgatattcaagaaaaagatcttttaaaaaataatatacaaaaacacattattattcactgcttaaagataattattatatagtaattgctttacatttatattgaatacgataaatatatttctcactatttt

SEQ ID NO: 2868 - DNA, 200 bp, Lawsonia intracellularis
ttgatatacatagaggatatatgagagctgagcaatatttgaagacatgtttagaatgtactataaaaaaactaggttatacctggcctaaaaaagcagttatagaaatcccccaaaatacattgcatggcgatcttgctacaaatattgctttagtccttgcaaacaatataggaataaatccaaaaaatattgctgaa

SEQ ID NO: 2869 - DNA, 200 bp, Lawsonia intracellularis
aaaattgctgaaaagttgcagcaagaaagtacctcattttcttctgtatctgttgcaggaccaggttttctaaatattacattttctccaactttttggcaaaaaactattaatcatatcctctctaaaggaagtagttatggctcttgccaattaggaaataaacagaaagtacttattgaatatgtttctgcaaatcc

SEQ ID NO: 2870 - DNA, 200 bp, Lawsonia intracellularis
tacaggccctttacatatagggcatggaagaggtgctgcaataggagatacccttgcacgtcttctacgcttcactggatataatgttactacagaatattatatcaatgatgcaggaaggcaaatgcaattactagggttatctatttggctaagaattaaagagcttagtgggatacaagttacatggccagaagaat

SEQ ID NO: 2871 - DNA, 200 bp, Lawsonia intracellularis
attataaaggaacgtatattattgaaattgcaaaagcattattagaagagcagcctgatatcatctcatatacagatatagatggtgagcaggctagttttcactttggtatgaatgtaatacttaacggtattaaacaagatcttaaaacatttaaagtagaacatgaagaatggttttcagaacgtacattaataaaa

SEQ ID NO: 2872 - DNA, 200 bp, Lawsonia intracellularis
acaaatgctattgaacaaactcttaaagctttagagtgtacaggacttacattcgaaaaagaaggtgctctttggttccaatctactgtttttggtgatgataaagatagagtccttcgtaaatcagacaaatcgctaacttattttgcattagatattgcttatcattacacaaagtataatagaggatttgatagaat

SEQ ID NO: 2873 - DNA, 200 bp, Lawsonia intracellularis
catagatatattaggtgcagatcaccatggatatattgctcgtattaaagctgcaatgcaagcttttggacatgatccaatgacatttgatattatacttattcaacttgtaagtttattagaaaatggtattcaagtagcaatgtctacaagggctgggcaatttgaaaaacttattgatgtaataaatgaagttggcg

SEQ ID NO: 2874 - DNA, 200 bp, Lawsonia intracellularis
tagatgcagcaagatttatgtttcttctacgtaaaagtgatgctcatcttgattttgatcttgaattagtaaaacaacgtacaatgaacaatcctgtttattatgtacaatatgcttatgctcgtatctgttctattataagaaaagctcatgaccttggctttactattactgatgtaaatgaagttcccttatcaaat

SEQ ID NO: 2875 - DNA, 200 bp, Lawsonia intracellularis
attactacaaaagatgaactcaacttattacgcctattagataagtttgaagatgtcatttataatgctgcacaacaccttgcccctcactatattacacattatcttatggaacttgcaggagaacttcatagttattatgcaaaatatcctgtattacaatctaatgaaaagactatagttctttctcgtcttgcatt

SEQ ID NO: 2876 - DNA, 200 bp, Lawsonia intracellularis
actacaagctgttggacaagttatttataatgcgcttaatattcttggtgtaacagctcctaaaaatatgtaactacctatgtcatataaaccaatatccaaaaaaatagtaagaccaaaaaagtatagttctcacacgacacctacttgtttctctttttcgattagtattccaggattatgtgtaatactttttataa

SEQ ID NO: 2877 - DNA, 200 bp, Lawsonia intracellularis
gtattatggcattaagctggagctttgtttttggaatactcataggaagagggtacagccctaaccataatctttctgaaattaatcaactcatcaatgatacatcatctgagaaccaaattgaaaaacagcctattttaaagccagaaaatctacgtttcatgcatgaactcaaacaagataataatcctactctatat

SEQ ID NO: 2878 - DNA, 200 bp, Lawsonia intracellularis
aataaagaagaaaaaaaaatacataatttatctcaagaaatagatacaaatcttcaacatagtcaaataccttcttcacacccacaccaagaccttaaacaaaaaaaagatatatcttctgaaacaaaaaatatacaaaaaaatattaatacaaaagagcaagttcaacaaataacatctcaaaatgatttaatgatata

SEQ ID NO: 2879 - DNA, 200 bp, Lawsonia intracellularis
tagttttgtttttcaagtagcttcatttaagaaaaaaattcaagcagaaaatttacgagaaaaactcgaagaagagggttttcgcacacaactagtaacaacaaacgatgaaaaaggtaatatacgttggtatcatgtcagggtactcttgagaggagtgatcagtgatgctataatagccaaagatacctttactcaat

SEQ ID NO: 2880 - DNA, 200 bp, Lawsonia intracellularis
taaaacttaaagatacaaaaattatttctcaggagccaaccggaagacatcgctaagtcacctggagcacatatgttaatggtatttaatcaattagttatattgcttggtcaatggactatcagtatttgtataacacttggagaaatatttttatttctacttgaagggttccgtcaaatatttattacaccaaaatt

SEQ ID NO: 2881 - DNA, 200 bp, Lawsonia intracellularis
atgctcaaaagccattagacaaatttatgttattggaactaaatcactttttgtcatttctcttataggattatttacaggcatggttcttggacttcaaggatattatgttcttataaaatttggatctgtcggttttttgggttcagctgtatctttaacacttattcgagaattaggtcctgttttaacagccatta

SEQ ID NO: 2882 - DNA, 200 bp, Lawsonia intracellularis
tgataatagctcgagcaggctcttcaatgacagcagagataggtgttatgcgtattacagatcaaattgatgcacttgaagtgatggatataccagggataggatatttagtttcgcctcgcattgttgcctcactcatatcatttcctcttcttacagctgtatttgatgttataggtataattggaggatatcttaca

SEQ ID NO: 2883 - DNA, 200 bp, Lawsonia intracellularis
ggagtatgcttactaggtgtaaatgaaggtgcatatttttcaagtattgaatcaagtacaactttatctgatattaatgaaggttctattaaagcattaacttttgctatacttgttattcttatttgttgttataaaggttataatgctcatcgacgtcgagatggtagaggtccagaagctgttgctaatgctactac

SEQ ID NO: 2884 - DNA, 200 bp, Lawsonia intracellularis
ctctgctgtagttgtatcatgtgtactagttttaattgctgattatgttgttacctcagcaatgttacgttaaggataaaaatcaatgccacatatacgtacagcttgggatatccgtttagaacacctctacttaggttatgaaaacaaagcaatacttcataatattaatacagtgattcctggtggtaaaataacat

SEQ ID NO: 2885 - DNA, 200 bp, Lawsonia intracellularis
ttgtattaggtgaatctggctgtgggaaatcaaccttactccgacatattattggattagctaaacctatttcaggtaaaattctttatggaggccaagacttattttctcttcctacaaaacagtttagaagtatcagacgacgttttggtgtactatttcaagatggagcactcttaggagccttaacacttgctgaa

SEQ ID NO: 2886 - DNA, 200 bp, Lawsonia intracellularis
aatgttggccttccattgtctgaaaatacaaacctccctccaactattattagagaaactgttattcgaacactgagtttagtaggattagaaaagtttgcagatttcttccctaatgaattatcaggaggaatgaaaaaacgtggtggactagccagggcaattgtcacagaacctccaattcttttttgtgatgaacc

SEQ ID NO: 2887 - DNA, 200 bp, Lawsonia intracellularis
aacttcaggattagatcctataaattcagcacaaatggatcagcttttaattggtatgaaaacccaatatcctgaaatgacattattggttgttagtcatgatcttgctagtgtttctagaattgctgagcatattttatttattaaagatggagcaataattttttctggttcatacccagaactaaaaagttcaaaag

SEQ ID NO: 2888 - DNA, 200 bp, Lawsonia intracellularis
atccatacttacaaagatttatagatcgtaaacctgaaaaggaaagtattcgtgtagaagcttcccctattaaccctgctgtgcgtgtggcccttaacgcttggcttgaagagtagataaaaggattacatatggtaatttcaaaagaagctgcagttggtttttttgttttaataggtttaatttgtttaggatatttg

SEQ ID NO: 2889 - DNA, 200 bp, Lawsonia intracellularis
actattaagcttggcaaaatggaactttttaactctgatggttattcagtttttgcaacgtttacatctgtttctgggctaaaaccaggagctgaagtagatattgcaggtgtaaaagttggacgagtaaaatctatacgacttgataataaattgccaagagctatagttgaacttaatgtcaataacaatatccatct

SEQ ID NO: 2890 - DNA, 200 bp, Lawsonia intracellularis
tacagatgatgctattgcctctgtgaaaacaagtggattaattggcgataaatatatcagcatttcacctggaggtacaggagaaccacttaaaaatggtgatgaaataatggatacagagtcatcagtcgatcttgaatcattaataagtaaatatatttttgggaaggtataactatatgtcaatacaaaaaactttc

SEQ ID NO: 2891 - DNA, 200 bp, Lawsonia intracellularis
tttaactttatatttttctttttaatactacttattttttcaaatcaagcagttgcaacaggtccgacaaaaactattgaaacttccgtaaatgacgtgattaattatcttaaggatccatcatactctaatcctcaaacacatctccaagtaaggaataaaattgaaaatgaagtaagaaaagtatttgattttagtga

SEQ ID NO: 2892 - DNA, 200 bp, Lawsonia intracellularis
attttcactacgtactgtgggtttaaattggaactcattcacaacttcacaacaagaacggttcaataatgcgttctctgatcttttacttgccacatatcttgataagattgatggatataatggagaaaaagtaacatatacaaatgaacttatttcttctaaaggagaccgagcagaagtccaaacagtcattaatt

SEQ ID NO: 2893 - DNA, 200 bp, Lawsonia intracellularis
tatctgatggtagaacaatacctgttgtatatagaatgatgtcaaaaaagaatacttgggttgtttatgatgtaattattgaaaatattagtttaataaaaaattatagagcacaattccaagatattcttatgaaaaataaacctgaagaactcattcaaaaagttgaggcacgagcaaaagaacttcacaatgcagca

SEQ ID NO: 2894 - DNA, 200 bp, Lawsonia intracellularis
tcagtaggaaatagtaagttaggacaataaatgttctcacaacaactacgaacctatgattttatcatttttattataatcataatgattataatacattttttttgcttaccagcacatgcaaaacatctccctccaatagagaataaaagttcacaatctcaagaactacaatcaaaaccaggatgcaaaccttcaac

SEQ ID NO: 2895 - DNA, 200 bp, Lawsonia intracellularis
atcttcaaaaataaaactgagtgatagtgactttgaagattatggtatatttgaagactatgatgaactttgcgataaaccaataaaagaccctttagaaccttggaatcgtttttggttctattttaatgatttcttctacttacgaattaccaagccactatataaagggtatgaagttattactcctgaatcgttcc

SEQ ID NO: 2896 - DNA, 200 bp, Lawsonia intracellularis
gtcaaggttttaaaaatgttttatataatctccaaactcctatcagattgtttaatagcctattacaaggaaaaattggacaagcttggattgaactaggaaaatttatggttaattcgactataggttttggtggatttattaatataacacaaaaagataaaccacttattcctatagatcctgatactgctgacttt

SEQ ID NO: 2897 - DNA, 200 bp, Lawsonia intracellularis
ggtcatactcttgctatatggggatttggagaaggaatctaccttatttggcctatacttggaccaagtacaattcgtgatacttttggtactataggagatgcagctgtaggtccttttgcatggtttgtaaaaccaataggtattgttcctctagaatatggactcacaactgaactctttttaacttttaacaaagt

SEQ ID NO: 2898 - DNA, 200 bp, Lawsonia intracellularis
taacacagttattgattcttatgaaagcattacaaaaagtgctattgaaccatatgttgctcttagagatgcatatgtaaaatatagaaggctaaataatggatgtatatgccgtgttcaaccttaataattcataataatatttaattagtgttactcactgtggtaactacatagggaaagtttgtaaaaatattttt

SEQ ID NO: 2899 - DNA, 200 bp, Lawsonia intracellularis
aataaccaatcgccaacgatattggagtgcttttcttttgggacaatatgtaaaagaatagacagtctcattagttgacttattttctgatattttttctggagtgattgtagcaacctctagaggaataaatggacagtcgtcacagtagccaaaatcttcaagttcagggggaatagaaggtatgctactgggttgaa

SEQ ID NO: 2900 - DNA, 200 bp, Lawsonia intracellularis
gttctaaagaaaaagaacgtatattttttacagcccctttcatagcaacaacaattcttaaacagctatctgttgcaaaagttacttcagcatgactccatgtaaatagattctgctgatcttgagggactggcttactttctttaccacaagaaaaacaaaataaactaagaaaaagtaaaactagagacaattgctta

SEQ ID NO: 2901 - DNA, 200 bp, Lawsonia intracellularis
tgttgcatgtgtcgttccatataataatttccattcaactaaagatttaagtgcatctaatggtgtaagtgtctctggattcatttcttttaataaggtgacaacaggatgttcaactaccttaacatcctgtttgcttagttcttcattagcattttgtactacaccaggtaacaaattcagtaaggagcggggttgtt

SEQ ID NO: 2902 - DNA, 200 bp, Lawsonia intracellularis
ggtgtgtttgttctaattgagttaaaataatttttgccctttggataactgactgaggtactcctgcaagtctagcaacctcgataccataacttctatctgcagggccagggatcaatctatataaaaaaacaagttcatcattccaatgacgaatagctatagtcattgtatgaacacctgttaatttttcttcaagt

SEQ ID NO: 2903 - DNA, 200 bp, Lawsonia intracellularis
gcagttaactcgtgataatgtgttgcaaataatgtacggacaccatcatgatctttacaaactaagtcttctgcaacagcccatgcaagtgcaagcccatcaaaagtactagttcctctaccaatttcatcaagaataactaagcttcttgacgttgcttgtctaagaattcttgctgtctccatcatttcaaccataaa

SEQ ID NO: 2904 - DNA, 200 bp, Lawsonia intracellularis
tgtactttgtcctctagcaagattatctgaagcaccaacacgagaaaaaattctatcacatataccaatctgtgcctctgtagcaggaacaaaggatcccatatgagctaataaacaaataattgctgtttgacgcagcacagtagatttaccagccatattaggaccagtaatcaaaagcattcttcttgtttcatcca

SEQ ID NO: 2905 - DNA, 200 bp, Lawsonia intracellularis
taacaagatcattaggaacaaaaacggatttaccaataatagattcaataacaggatgtctaccttcacgaataaaaatattattattagttaataaggtaggcttattccaattatgtcgtatagctacatctgccaaagattgccataaatcaagttgagctataagacttgccataaaaagtattcttggacggata

SEQ ID NO: 2906 - DNA, 200 bp, Lawsonia intracellularis
gaaacaagttcctcacgtaatttttgaaatagtttatactcaagtgtattacgtttttctgttgctgaaagaagtcgctcctccaaatctttcagttcttctgtagtataacgctctgcattagctaacgtttgacgtctgacaaagtgagagggtggggtgcctgcagactttgtgagttcaaaataatacccaaaaac

SEQ ID NO: 2907 - DNA, 200 bp, Lawsonia intracellularis
acgattaaatcctattttaagtcttggtaaattatttaccttctgctctttttcaagtaaagcttgaagttttgattctccatgttctaataaatccataagttcatcaagttcagcattaaaacctaacttaaataacccaccttcaacaatagaattaggtggattttcatcaagagctttatcaagtttttcagcat

SEQ ID NO: 2908 - DNA, 200 bp, Lawsonia intracellularis
agtcagatatattatcccactttgttaataattgtcttaaaattgttggcattgtggataagatagattcatctatcgtaatatatctattatctttaacatttatttctactattaatgcatccttaactcttggtaagataagaagtgtattttttaatgcaaggagatcttttggagatgtacgatttaatacaata

SEQ ID NO: 2909 - DNA, 200 bp, Lawsonia intracellularis
cgagtagataatctttctagatcatagatagctttcaatgcgtcttgaagtttcttcatattttctttatataatattagccattccaatacactttgattttctaaaatagttgtaatatctctccaggggtgatgaagtcgttcctcaagaagtctcccccccataggggtcaaagtatgatctaaaacatgaataag

SEQ ID NO: 2910 - DNA, 200 bp, Lawsonia intracellularis
tgtaccaactcccttttttccattaactcttttgaaaagttcaagatttttttctgttatttcatcaagaataacatatttcccaatatctaaaggtttaaaaggcattaaatgatttacatcttgtaactgtgtttgttcaagataagcaactaatgctccacaagcttgaacaagtattgtatgcttttcaagaccaa

SEQ ID NO: 2911 - DNA, 200 bp, Lawsonia intracellularis
gtgcttctaagtcagcaacaccctgagcttgtaaaagtctttttactgcttgtggatattcaaaatgagttttatacggtagtggaacaaattgtatttctataagctttgctgtagcaggaagttcatatttttcaggaaataaaagctccttaggaagtattttttgtatccactgccaaagctcagattttttcttt

SEQ ID NO: 2912 - DNA, 200 bp, Lawsonia intracellularis
acttgtataccagtccataatcctgtagaaacatctgcccaacaaaatgcaccaatattaacctcctcatcccaatacattgctcctaaatatgtatgtgttttaggatctaaacttgtttcttctgtagttgtagcagaagtgaaaactcttgtaactttccgttgaacaagtccttttgattcacgaaaatcttctgt

SEQ ID NO: 2913 - DNA, 200 bp, Lawsonia intracellularis
ttgctcacaaagagcaactttatatcctttctgaataagttgatgaatataactatctgctgcatgccatggaacaccacacataggaacaggattttcagcacgaggatttcttgctgtaagagctatttgtaactcccttgctgcagtttcagcatcttcaaagaaaagttcgtaaaaatctcccattctataaaaaa

SEQ ID NO: 2914 - DNA, 200 bp, Lawsonia intracellularis
gtaatgtgtctggataattactttttatactaagatattgctctaacattggtgttatacggtgagatgattcattcatagtcttaagtcagattggataaataaagattaaatactaataaaaaataagcctagttacaatatggaggataataatcaattttctaaaaatgattgctctaattctttattttgtgttt

SEQ ID NO: 2915 - DNA, 200 bp, Lawsonia intracellularis
catagttatttttttctttagttatatgttcaatatctttttctagggtccgaatacgtatgtttgcaagtgcaagatgagcagaaagtcttaaacgatcccaaacaagaagtgcaagagtaacaagagaaccaattaaaaaacagataaggagtaatgcataaatgcttattggtttagagagcataggttcaataaaa

SEQ ID NO: 2916 - DNA, 200 bp, Lawsonia intracellularis
aaaaggtctagagtaagaggtataacttgagaaagagcagactgattttggacaaaaaacatcataaccaaaaaaaagattataattgccagaaaaactttcacgtacttcatgtagtagctccttgaaaacgttaaagtgatatcgtagaaaagagtggtttaagtttattataagtagaagtaatgtgttcagaaata

SEQ ID NO: 2917 - DNA, 200 bp, Lawsonia intracellularis
atctttgtttcactaagtacagccataaatgaagaatctccaacccatcgaggaagaacatgaaagtgtagatgatcacaaataccagcgcctgctgcctcaccaagatttaagccaatattaactccttgaggacaaaatttttctctaagaattcttgtacattgttttaacaaaaacataagttcatatgactcctc

SEQ ID NO: 2918 - DNA, 200 bp, Lawsonia intracellularis
atctgtgagtaactcaaattcacttatatggcgtaaaggtgctataagaacatgtccattaatataaggaaatttattcatcataacaaaagtattaattcccctatacagtattaaatatttttcatcgtcagatacacttatatctgatatacaaaaaacacacttatcttctttcttacgcgaaatatattcagatc

SEQ ID NO: 2919 - DNA, 200 bp, Lawsonia intracellularis
gccaaggagcccatagaggttgcattatatgcatccttattttttattttatttaaataataataataatatacatgaatgcgtttcacagcaagttttgtctatataacaccttaaaattaaataataaatatcattaatcttcgtcaataactaagataaattatacctcaaacaaagatagtctaattcatcttctt

SEQ ID NO: 2920 - DNA, 200 bp, Lawsonia intracellularis
ttgtatgtacattgccatcaagtttttgtttaagaacgtcttctaaaataactttatattgggggcctggtacaagtccaagtttttttaaatcatttccagtaatatatggcttaataaatctccataatgagatatattgagaaataaagtaggttacagaggaggaataagaaaaagcttgaagaaaaagtaatact

SEQ ID NO: 2921 - DNA, 200 bp, Lawsonia intracellularis
tctaaagttagcttagaaagtaaagtaaatatagtagaaactggtccttctttttcaattttcttttcatgtaaaaggcaacaaagagtactatccatgtcttgagccatagaaagagttaaagctatttttttttgatatgctgattctactcctatcttttggagcagagctataatttgttcttgtgaaagagaaga

SEQ ID NO: 2922 - DNA, 200 bp, Lawsonia intracellularis
acacatagctgtgagataaataatcattatatctggctgattttcagtcaaattcaaggaatgataccattgtaatatgttggaaatgttataaaaaagtgtcttttgttttgacgtaagagaaaaacgtttatctattgctgttaatacaccaagttcatccattcgaataatacaagcatcaggtttattttctttaa

SEQ ID NO: 2923 - DNA, 200 bp, Lawsonia intracellularis
aaatcatttcaaactcatgtagcaacctttgaccaaagattttttctattacattacactttaaggcataatgcatatatttttctgtttgctggcttatcctaaattgatagcgctgttcaaaacgaatagctctaataatccgtgtaggatcttctataaaacttaaagaatgaatgacatcaatagatttattctga

SEQ ID NO: 2924 - DNA, 200 bp, Lawsonia intracellularis
atagctttttgtccatggaaatgatcaataagccttccaaaatatttttggttaagttgaagagccattgcatttatagtaatgtctcttctgaaaagatcttgctcaatggatgtaggctcaactaaaggaagagctccaggcatagcataatattcaaggcgtgctgtagctatatcaatagagcactccttctcaga

SEQ ID NO: 2925 - DNA, 200 bp, Lawsonia intracellularis
tgtaaaaggatacctcacattagcagtcataaggttattatgggtataacctacaacccctttaagctttttagctaatgcctcagcaaaagaaagagattcaccttcaacgacaatatctatatctgttttttctactatagataaattattaagtaagatatctcgaacaacccctccaactacgtatacattcacat

SEQ ID NO: 2926 - DNA, 200 bp, Lawsonia intracellularis
gcaaaaaatcacccaattttcctacctcacttaataacttgaataaggtagtagaaagatttgattgaagtaacgttaacatgtctagataacataggtgttcatctatagaagtttcttcaaataaattacttttatctatctgagacaaccttaaaagccttactttatctatagtagtagccactatattattttca

SEQ ID NO: 2927 - DNA, 200 bp, Lawsonia intracellularis
ataatagggataatcggctgttgagtctcagtaaaaatagtaaaaagttcttcaattgatgttgttggcgtggctgtgatgatattactattcataaattccttcacaggttgatcgcctaatccataagaaatagcttttgagactgtaatattatcaatataccctatacattgttttgtttgattatgaaagatgag

SEQ ID NO: 2928 - DNA, 200 bp, Lawsonia intracellularis
tatagtatcaagtgaatagtcaaacatgacttgtttaacttttgaaagagatacacactcttcaagacctataggtgaataaggtatagttacttccataggattatccaacatagctaagagagttgaagatagcattggctcaaattatatacataacctatattaactatagatgtattagaaatattgatcatgta

SEQ ID NO: 2929 - DNA, 200 bp, Lawsonia intracellularis
gttatctcactagagacataatttgaacgggggtgaaacatactatggatatattttaaacgatctgactgtacatgtgtatatagctcagttgcactcatatctacatggccaagaagtagttggacagatctcaagtcagcacctccttcaagaagatgggttgcaaatgtatgtctaaatgtatgaggagatattga

SEQ ID NO: 2930 - DNA, 200 bp, Lawsonia intracellularis
cttattgatactagctaataatgcataacgtttgataattttccaaatagcttgtcttgtaagtcctttcccagatctatttagaaaaagaaacttttctataggagtaaacataggacgaattttttggacataatgaataagaagtttcatagcagaagagtgtagtggaatgtatcgttctttacctcctttaccaa

SEQ ID NO: 2931 - DNA, 200 bp, Lawsonia intracellularis
aaactttgataatgcctttgtcttgatcaaaatctaatacatgaactcctattaactcagatactcgtattcccgaagcataaagaagttcaagaataactttatctctaaatcccaatttatttgttatatcaggtgtagtaagaagccttaacatttcatcttgagacaatatgttaggtaaaagagatggtagcttt

SEQ ID NO: 2932 - DNA, 200 bp, Lawsonia intracellularis
ggtccatcaataagcagagcagggtttgacaaaagaatatcttcttcaacacaccaatgaaaaaaatttcttatagaagaaagtcttcttgctagtgttctagaggagtctccacgttttcgtaaccatataataaataacataatatattcgtcatcaatagagttaaagttacatccagcatcttgaaaaaataaata

SEQ ID NO: 2933 - DNA, 200 bp, Lawsonia intracellularis
aaaaacatcaatatcttgtttataagcttggattgtattatgagaaaggcctctttcactgataagcttatcaagccatttccaagcaagctgactagaaaatattgtatccataacttttacttagggtatagaagtaacttcaaaaatattaagacctatttgataaaagggtattataattagcgtagttaaataaa

SEQ ID NO: 2934 - DNA, 200 bp, Lawsonia intracellularis
tacataaagaagtctaaaaatatataacctataaaaataaaaacatctaactatatctagaaatgtataacttatttttgtaatattattttaatttgttaaaatgtatgaagaaaatactaaaaataaattctaacatgactaactataaaacatcatatataagtctaggaacaaatctaggtaaccttgacgacaat

SEQ ID NO: 2935 - DNA, 200 bp, Lawsonia intracellularis
ctaaaagaagcaagaattagactaaatactaataacaaaattatacttaataggatatcccctgtctataacacagaagcccaagataattgtaatcaaccatggttcaaaaaccaaatcatccaattagccacaatagatctgacacctcatgaactgttagatatacttctaaatatagaaaccagtatgggacggat

SEQ ID NO: 2936 - DNA, 200 bp, Lawsonia intracellularis
acgaagcaatgatccagaacaacgttatggtccaagatgtattgatttagatttattattatacgaacaagaaacttataatgataaaaaactttgcttacctcatccaagaatgctgcaacgtgcctttgtacttgttcctctctatgacattaatccagcacttgcatttccgaatggacaaacgctaaaagaggcat

SEQ ID NO: 2937 - DNA, 200 bp, Lawsonia intracellularis
tgaaaaatatttcatatagagtagaggataattttatctaccaataacataacaaaaaaggaaaaaatagatgttatggagaattttgctagttggattaataggttatgcactgtatagaatgtttatacatgatcgtcaaaaaaaatctaatgattcacaaaaaaaaaaggaacaaatggtagctactggagaaatga

SEQ ID NO: 2938 - DNA, 200 bp, Lawsonia intracellularis
caaaagatcctacttgtggtgcctatgttgatacagaaaataccatatccgtacgaaatggtgaaactgtctatcatttttgtagttatgactgtagagatacatttctaaaaaaaatagataagcttcttgaaggtaaggaatcctaatagattaaaaataacaataattattaataaaaaataataagctatctattt

SEQ ID NO: 2939 - DNA, 200 bp, Lawsonia intracellularis
atttatattttctttttaaagggtgtgactttgtttattcctagccaacttatgtcataattgtagcctagctagatttaatacaggataattcaattatattgctgtaattatatatagtaattcatactaatatattttttattttaccagaagggatacattgtgttatgtctaacttactttttacaataaaaaca

SEQ ID NO: 2940 - DNA, 200 bp, Lawsonia intracellularis
caatataaacctcaaggagatcaaccagaagctataaaacaaattgtttctaacatccaatctggagtgaaagatcaagttcttcttggagttacaggatcaggaaaaacattcactatggctaatgttattgctcaatgtaaccgtccagcacttattcttgcacctaataaaacactagcagcacaactttataatga

SEQ ID NO: 2941 - DNA, 200 bp, Lawsonia intracellularis
atttaaagaacttttcccatacaatgccgttgagtactttgtaagctactacgattactatcaaccagaagcatatgtaccatcatcagacgtatatattgaaaaagattcatctattaatgatgatattgataaacttcgtcatgcagctacacatgccttacttactcgacgagatgttattatcattgcatcagttt

SEQ ID NO: 2942 - DNA, 200 bp, Lawsonia intracellularis
cctgtatttatggacttggttcaccagaatattatgcacgacttattattcctgtggaaaaaggccagcagattaacatggatgaaattattacccgcttagtagatattcaatatcaacgaaatgatatggactttcatcgtgcaacatttcgtgttcgaggtgacgttctagaaattattcctgcatatgaacatgaa

SEQ ID NO: 2943 - DNA, 200 bp, Lawsonia intracellularis
cgtgcattacgtttagaattttttggtaatgaaatagaagaaatacgagaaatagatcctctaacaggagaagttcttggtaatgttggaaaaacagttatttatcctgcaagtcactatgtatctgatcgagataaccttattcgagcaatgacagatatccaaaaagaactttgtgagcgcttatatgattttcaagc

SEQ ID NO: 2944 - DNA, 200 bp, Lawsonia intracellularis
taccaataaactagtagaagctcaacgtcttgaacagaaaactcaacttgatttagaaatgatccaagaatttggatattgtaatggaattgaaaattattcccgtcacttggatggtcgtaaaccaggagatcccccatctactttactagactacttcccaaaagattttcttttctttattgatgaatctcatattg

SEQ ID NO: 2945 - DNA, 200 bp, Lawsonia intracellularis
ctatcccacaagtaggtggaatgtttaaaggtgatcgttctcgtaaacaaacgcttgtagattttggatttcgtttaccctcagctcttgataacagacctcttgagtttcacgaatttttaactcgacttaatcaagtcatttatgtttctgccacacctggaccatgggaactagatcgctctcaaggcattattaca

SEQ ID NO: 2946 - DNA, 200 bp, Lawsonia intracellularis
gaacaaatcattagacctacaggactattagatcctgaaattgaagtacgtcctattaaaggacaaattgaaagtttacttgaagaatgctaccaacgagttaattcacatgaaagagtattaataacaacacttacaaaacgtatggcagaagatttaacggactaccttaacaatatgagtattaatacccgctatct

SEQ ID NO: 2947 - DNA, 200 bp, Lawsonia intracellularis
tcattcagatattgatactttagaacggatggccattataaaatcattgcgcacaggagaatttgatgtcctagtgggtattaacttattacgtgaaggtcttgatatcccagaagtatctttagtagctatcttagatgcagacaaagaaggttttttacgctctacaggttctcttattcaaacgtttggaagagctg

SEQ ID NO: 2948 - DNA, 200 bp, Lawsonia intracellularis
cacgaaatgtttctggaaaagttatactttttgctgatactatgacaaaatctatgaaagcagctatcgacgaaacacgacgacgcagagctctccagcaagaatggaatacaaaacataatattactcctaagaccatccaaaaatctgtagttactccttttgatatgatatctgcaaatacttcttcaaagaaaggt

SEQ ID NO: 2949 - DNA, 200 bp, Lawsonia intracellularis
tgtagaaaaaataaacattctatggatacaaaagaactttttgttattacagataaaacatctccagaagatattaccaaatatattaaacaactggaatacgaaatgaaagaagcagctaaagaacttgaatttgaaaaagcagctgtattacgtgatcgaattaaagttacacgtgaacaatttttactcatgagtta

SEQ ID NO: 2950 - DNA, 200 bp, Lawsonia intracellularis
atatagatgaggaaaatgttgtgtctataaattcacctcaatattctttaccttctaaaaaagaaaaacaacgtgtaagagaacttcgcaaatttattaatcatcataattatctttattatacacttgatgatcctgaaatatcagatagcgaatatgataaagcatttcaagaacttctaacactagaaaatacattt

SEQ ID NO: 2951 - DNA, 200 bp, Lawsonia intracellularis
ccatctttaaaaacaaataattcacctacacaaaaagtaggaaataatattctaaaaaaacttgaagaacaaccacataggcaacgtatgtatagccttgataatgtattttctaatgatgaatgggaaggattcttaaaaagacttgcaaatgcacttccagaagtaccattctcattttggtgtgatccaaaaatgga

SEQ ID NO: 2952 - DNA, 200 bp, Lawsonia intracellularis
tggtcttgccttagagctaatttatgaaaaaggtcaattaacaagtgcgcttactcgtggagatggagatattggagaagttgttacagaagctgtcagaacaatttctaatattcccaaaagattaaaacactctataaatgctccagaacttcttgaaattcgtggagaagttgttatttcacgagcagattttaaaa

SEQ ID NO: 2953 - DNA, 200 bp, Lawsonia intracellularis
aacttaataaagaacaagaaaaaaagaaaaaaaaactttttgctaatcctcgtaatgctgcttctggctctgtaagacagctagatccaacaattacagcttcacgtcctctcagattcttagcatatggtataggagaaatacaaccatcatctttaaaatggaatacataccatgaattaatgtcatacctaaaagaa

SEQ ID NO: 2954 - DNA, 200 bp, Lawsonia intracellularis
tatggttttgaaacaccaccaaaaggtaaactttgtatctcatctacagaagttcaatcctattatacaagactacaggcacaaagatattctttacgttatgaaatcgatggaattgtcatgaaattagatgacatacagtcacaagaaaagcttgggtatacttcaagggcacctcgatttgctattgcatggaaatt

SEQ ID NO: 2955 - DNA, 200 bp, Lawsonia intracellularis
cccagcaacacaagtacaaacacgacttctacagattcatatccaagttggacgtacaggtgtattaacacctgtagcagaacttgaacctattaatgtaggtggagctactataagcagagcaacattacataatgaagatgaaataaaaaataaagatataagacctggagatatggttattgttcaaagagcagggg

SEQ ID NO: 2956 - DNA, 200 bp, Lawsonia intracellularis
atgtcattccagaaattgtttctcctattctttcagacagatcagctaaaagtaaacctttcgtctttcctaaaatatgcccagtttgtcatgaaaaagtatatcgtattaataatgaagtagcttggagatgcattaacctttcatgtcctgcgattcgtctacaatctatcatctattttgtatctaaatcaggatta

SEQ ID NO: 2957 - DNA, 200 bp, Lawsonia intracellularis
aacattcaaggaattggacagcgcttaatagagttacttgttacttctggatgtataaaaacacctgcagacttgtttactctcactactgcagatttactaacatacaaaagaatgggagcaaagcttgctgcaaagactattcaagctctttctttagcaaaacaaacaatgtctcttcatcgtcttatttgtgctct

SEQ ID NO: 2958 - DNA, 200 bp, Lawsonia intracellularis
aggaatcagacatgttggagaacaaacagcaaggatattagcttcttcattcatagatttagatgcactatcttctgcatctttggaagatcttcaacaattatcagagattggtcctgaagtagcaagttctatccaagccttttttaaaaataaagcaaatattcaaatgataaaccaatttcgagagatgaatattt

SEQ ID NO: 2959 - DNA, 200 bp, Lawsonia intracellularis
ggcctatacaacaagtaaatgatacaaccacaaaaggtttttttacaggtaaaaaacttttatttacaggaactcttgaaagaccaagagctgaaatgaaacgcttagctgaagaagcaggagccattgtaatgacagggatatcacataagttagactatgttatagccgggaaaaacccagggtcaaaacttaacaaa

SEQ ID NO: 2960 - DNA, 200 bp, Lawsonia intracellularis
gcacaagaattacatatttctattcttgatgaacctacatttttacaaaaacttttaatagttctttaaaaaataggagaacacaatggatctttctatcattgttattggcgcttctggtcgtatgggaaaaacaattattcaagttgcacaggagcaaggtattattattgatgctgtaatagatcgtcctactcgtc

SEQ ID NO: 2961 - DNA, 200 bp, Lawsonia intracellularis
taacatctttagcatcatataatatagctagtgatagtgaacctgataaaattttttcaaggtatcctcaagcagttgtcattgattttaccacaccagaaacatctatatctatggctcaagttgctcaaaaatatggtaatcctattataatagggaccacaggatttacactagaacaatttgatacacttgaaaca

SEQ ID NO: 2962 - DNA, 200 bp, Lawsonia intracellularis
ttagcaaaaacatcccgaatcttttggtctcctaatatgagcattggcattaatgtactacttaaaactttacctcaaatggcacaaatcttaggaaatgaatataatatagagatagtagaagtacaccataataagaaaaaagatgcaccaagtggtactgcaatgagaatagcagaaacattaagtacttctcgcca

SEQ ID NO: 2963 - DNA, 200 bp, Lawsonia intracellularis
ttgggaccttgaaaaagtagcttgctataatagagaaggtattgtaggtgaacgacctcaagagcaaattggtatacaaacaatccgaggaggagatgttgtaggagttcatacaatatactttattggaccaggtgaacgtattgaaataacacatcaagcagattctcgaaaaaactttgcacagggcgcattaaaag

SEQ ID NO: 2964 - DNA, 200 bp, Lawsonia intracellularis
ctgcagagtggatcataaaacaaaaagcaggaaggctttataccatgatggatatcatataaatgaatacaaatatagctctattacaattacatactataacaggagatattatagcaaatacacaaaatattctgcaacaagtaagtaaagcaaaaaaagatggagctacagtatgtatcactcctgaactcagtctc

SEQ ID NO: 2965 - DNA, 200 bp, Lawsonia intracellularis
tgtggccatccagacctgcatgaaataccaacaataatttctacctgtatcaattctcttcagcagatagcaaaagagtgtaatggtggaccatcgattattgtaggaagtattgaaacaacacctactaatatatataataccacttttcttatacagaatggacaaatccatacactatgcaaaaagccttttactca

SEQ ID NO: 2966 - DNA, 200 bp, Lawsonia intracellularis
attttatccttctataaaaaaagaagagtatattctaattaataataataataataatggattctgttttactagtataaataaacagttattccttatagttacaggatataaaacactaatcaattatgtatgtaataaaataatctatcaaaacgaacaattaaagaaagtagaagctatactttgtccttcttcag

SEQ ID NO: 2967 - DNA, 200 bp, Lawsonia intracellularis
aaccatttattgcttcgcaaatccctcattttttttatgagctaacgtcaatatctgaccaactaaataaacctctatatttttgtaaccaagcaggtgaagacaaaaactatatttttttaggaggtagtcaatgtattaattctcaagaaacaaaaaacaatcaatctctactttttcaagaaaattacatagttgta

SEQ ID NO: 2968 - DNA, 200 bp, Lawsonia intracellularis
aaaaatcattcatctgtttctttaaaagatatgtcctttaactctaataagttattatgggaagctcttatccatggaatccaacagtatgtgaaaaaaaatggattttcagatgttgttttgggactttctggtggtatagattcttcaattgtagcagccctagcggtagaagcattgggagaacatcgtgtacatgg

SEQ ID NO: 2969 - DNA, 200 bp, Lawsonia intracellularis
tatattaatgccatctccttggtcaagcgaaggaagtataactgatgcagagctgttagctaataatttagatgtaaaaacatatttgcttcccattcatacattaatagatagttttactcatagtctttcagaactttttataggatatcccccagatgttacagaagaaaacattcaatctagaattcgaggggtac

SEQ ID NO: 2970 - DNA, 200 bp, Lawsonia intracellularis
ttcttatggctatttctaataaatttggatggatggttctatcaacaggaaataaatctgaacgagctgttggctactgtacattatatggagatacatgtggtggtcttgctcctataggagatctatataaaactgaagtttaccacttagcccaatggtataatcaatcaaaacaaaaagacattattcctactagt

SEQ ID NO: 2971 - DNA, 200 bp, Lawsonia intracellularis
gtattaacaaagccaccatctgcagaactccgtccaggccaacttgatcaagatagtcttccaccatataaagaacttgactttattcttcaaatgttactctcaaaaaatccaactaatatagaccaagaacttcttaacaatcctaaactaaatgatataaaaaggcttatacaaaaaaatgcttttaaacgtatgca

SEQ ID NO: 2972 - DNA, 200 bp, Lawsonia intracellularis
aggaccaccaagtcttgttattagtaatttcccattatagttctctagtatgatgatgtatcttaaaaataacaacagcatttttattaataaaaatgctgttgttatttttaataataaacttcattactattctaagattctgttttattggaaataatacttcttttttttcttaagctgtctcttaaccaatcata

SEQ ID NO: 2973 - DNA, 200 bp, Lawsonia intracellularis
ccatacttgtaacccttctcctgtacggcaggaaagactaatgatctctaaaggctcatttaacttacgtgcatgttgtgtagctttctctatactaaaattaacataaggcaatagatctatcttattaagaattaatactcctgcacgatggaataaaagagggtatttctctggcttatcatctccttcagttacac

SEQ ID NO: 2974 - DNA, 200 bp, Lawsonia intracellularis
caagaacggcaacaatagcatcctctccacaatcaaactccgcaggacaaacaagatttcctacattttcaataaataagatatcaatttcattaaggttaagagatgtaagggcttccataatcatattactatctaaatgacaccctccatctgtattaatttggacagcttttacaccagtagcagcaactcttttt

SEQ ID NO: 2975 - DNA, 200 bp, Lawsonia intracellularis
gcatcattatctgtctgtaaatcaccttcaataacagccattctaaactcagatgaaagatcacttaaagttctttcaagtaaagacgtctttccagcgccaggagaacttataatattaagagttaagatattatgctctgcaaattgcttttttaacatagctgcaagtttactattcacttcaagaacattacgtac

SEQ ID NO: 2976 - DNA, 200 bp, Lawsonia intracellularis
cacaggtatttccattaacttactcctattctacttcaagatgttgaatataaaattctcgacctgtctcaacattatatgccacctcttttttgcaagaaggacatgtaataaaaaaaatcttttgtttatcttctggggtaaatagagacaaacagtttgaacatcgaagcataagaggaattttttctatttctagt

SEQ ID NO: 2977 - DNA, 200 bp, Lawsonia intracellularis
attgctccttcaagacttgttccttcagtaaaaattttaaaagcaaattgtaatgagtcaggaacaatatttgtaagctcaccataacaaacctttacacgttgaagcttattgactccattctttgacatttcttcctgaataatagaaagtatacctgtaactaatgacatttcatgcatacaattatgttatataaa

SEQ ID NO: 2978 - DNA, 200 bp, Lawsonia intracellularis
aaaataaatggcgtctacttttaatacaaatacattgctttttcttatatccttctataaatactacttattatataaaacaaattttttgatctattaataagttagtaaaaaataactgttatgataacaactctaatataaaaatttcttggcttttctctataagtaactatagttatttattagctatactaaat

SEQ ID NO: 2979 - DNA, 200 bp, Lawsonia intracellularis
ataacaaatttaatactaggtgtaatgtgacaaagggtacttttttaggagtctatgctagttatagtaataagacagctaccaatacaaaaaaggctttaaaacattattggtttgtatgggaagatagcaatggatatctagttcaattattagataatacttatcaacccattgctgaaccacaaactcttcctctt

SEQ ID NO: 2980 - DNA, 200 bp, Lawsonia intracellularis
gaaatttttaaaaaaaattttataaatcaacctcacatcctagcagcacctataacttcactacacccatcaagtaaaaataacacagaaaaaactataacaaaatatcacaaacaatataaaactacgcttaatacctctcaggtaaccaaaaacaactttaacgttaaaaaagatatgataatagagcagagtgaaca

SEQ ID NO: 2981 - DNA, 200 bp, Lawsonia intracellularis
agtaaaacatattgatactcaacttcgctctgaatttactacggctttagaacgttggaattctggtgataagctagcaccattaaaaacctttgaaggactttcaaatgttcaagaaggtattgtaccagaacataagcatatgtttacagactttggtgtcaatttaagaaaaaatagtttacctaaattagctatac

SEQ ID NO: 2982 - DNA, 200 bp, Lawsonia intracellularis
ttcattttaaacgtgcagtagagttaagtcctgaagatgctcatgcacactttaatttagcccgtatttgttatgaattaggcaaccttaatgaagcagaacaacacttagaaagagcactttctatttctcctaatttgaatgttgcaataaagtttcttggatttattcatgaccaaaaaaaatactcttgatataaa

SEQ ID NO: 2983 - DNA, 200 bp, Lawsonia intracellularis
gagttaccctagcgttaggagctaacaacatgtttcgtatgattgttttttttactgtaggtatcattatgcttattcttgcttgcttagctgcacttgagttcatacaagattttcccaatagctatcaagaagatggacaaatggttacaggaattatttcaaaaataataggctctaactgtgataattcttcaaca

SEQ ID NO: 2984 - DNA, 200 bp, Lawsonia intracellularis
tctgatataaataataagaaatccatagatagagataaagatacattactctcaagtagtaatagaaatacaatacaagccggtactccacatcaagaaaataacataaaagaagatcttcaactgactaacaaaaatgaacaaacaactccagaagaagaagaagaaagtaaatttatttggttaacagaagctccatc

SEQ ID NO: 2985 - DNA, 200 bp, Lawsonia intracellularis
agagcttaaaaaaggagaaaaagctataacacaaacaagattgtctattggtaaggatatatcttttagaattactgctgatgatgccatcaaagctcaatcaatgatgttaaaaaatccagataggtttgttttagatcttcaaggaaagtggggtatttcccttccacctattccacctacaaatccttggttaaaaa

SEQ ID NO: 2986 - DNA, 200 bp, Lawsonia intracellularis
aaatacgcttaggtactaataatggaaatacacgacttgtctttgatcttcaaaaaaaaccatctaaaactgaaattaaacaattagatacaaataaaattgaaatccaaattcattaaattgcatattagacaataagttataataaatttaaaccatatgctcgttaatcaagtttgcttaaacttagtccagccata

SEQ ID NO: 2987 - DNA, 200 bp, Lawsonia intracellularis
cgagaaagttcggcttgtttttcaaaatctgtaagctgcttacaacgagtaaatgttatattttcatttatatctttaacaattaaaaaatgacgagatgccttgaccgcaagttgtggccagtgtgtaataactaataattgctttttatcagcaagacttactaatttatctgcgactttaaaaagagtatgaccacc

SEQ ID NO: 2988 - DNA, 200 bp, Lawsonia intracellularis
aatacctgcatcaatttcatcaaaaataagcataccttcatcttcacttgactgtattgaaacaactgcaagtaaaaatcgtgataattctcctcctgaagcaattcgttcaagaagctgaggaggttgaccaggatttggtgcccataatatttgggccttatgttcaacacatccagaaaataattcatatggtataa

SEQ ID NO: 2989 - DNA, 200 bp, Lawsonia intracellularis
agtctattatcacattaagatagtccgaaaaacctaagtcaattaactgtgcttttaatgcatgacaaaacttattagcagctttctttcgtaattcataaattttctcaagtattacttgaagttttttgatcaatatagtatattgtttttcaatctggcgtaagtctagtacacaactatctaaaaaagataactta

SEQ ID NO: 2990 - DNA, 200 bp, Lawsonia intracellularis
tcctcaatctcttctttaaaagaaaaaatttctggtaaacttcgatggagctttcttttaagttgtgaaagttcaaataaacgtgcttctatttcttcaatatttttatttttttctgatgtaactagtgaaagtttttgtaatttttgtgctaactcgttcaattgttgtctacattcaattatagtagggagactatc

SEQ ID NO: 2991 - DNA, 200 bp, Lawsonia intracellularis
catgatgctttgatcaatagacagaaaacattctaagtttttctcaatgagagaaagatgattaatcaaacctccttcttccccctgaagaagttgcaaaatcatcaattgttttttttgaagaattgcaatcgaacgaatatcttcttttagtaattctaattgttcatcttcattaggaattggttttactttgttga

SEQ ID NO: 2992 - DNA, 200 bp, Lawsonia intracellularis
tatcgtatagatacgattcaaataaatcacgtcgttcttcaatctcttgacaacgatatatgagcttctccttcttttttaataatgttttaatttcttcaattaatatatctttttgctgaaaaagttctggatgttcaacccaagcatctataattttttcttgatacaaaggttgaagtaatttttgttgaccatgt

SEQ ID NO: 2993 - DNA, 200 bp, Lawsonia intracellularis
tgacttgtatgtgtaagcaatttaggctgcaattcttttacagtgttttgagacgtcagtttatcattaagataaaaacgacttcttcctgtagcagcagaaagttcacgtcgaagaataagctctcctttttctggatgaacaaaaagtgcttcaatttgagctcgttcttttccttgacgaaccatatctactcttaa

SEQ ID NO: 2994 - DNA, 200 bp, Lawsonia intracellularis
cttatcgcccataagaaaattaattgcttttaaaataaaactcttaccagcacctgtctctcctgtgattacattcataccactggaaaattccagttctatatcatcaataagagccaaattttgaatacgtagatactcaaacatcattctttttactcactaataaataaagaaaggatattgactcaaaaacaatt

SEQ ID NO: 2995 - DNA, 200 bp, Lawsonia intracellularis
acaactaacgtgctaaccgtggatcaaatgtatcacgtaacccctcacctaataggttatacccaaggatagttattaaaatagctaaaccagggtaaaatgaaagccaaggagctatttcaagtgtatctttaccttccattaacatatttccccaactaggatctggaggttgcaccccaagtcctaaaaaacttaaa

SEQ ID NO: 2996 - DNA, 200 bp, Lawsonia intracellularis
gaagattctactaatattgctcctgcaatacctaatgttgctgaaataaaaacaggagtaagtgtatttgggagaatatggataagaagtatacgtgtagtacttgcaccacaaagcttagcagcagcaataaaatctctttctcttaaagataatgtttctgctcttacaagccttgctactcccatccaggatgtaag

SEQ ID NO: 2997 - DNA, 200 bp, Lawsonia intracellularis
gccaataataatcataatatttgttaaacttggttcaagaaatgcaataacagcaagaataagaaaaaatgaggggaaacaaagcattgtatcaactactctcattataatttcatctgtaataccaccaaagtaacctgcaattaatccaaaaaatacaccaatgacaacagcaatacctacagcaatgaatccaactc

SEQ ID NO: 2998 - DNA, 200 bp, Lawsonia intracellularis
caagagaggctcttgctccatataataatcgagaaagtacatctcttcctaatgcatctgttccaagaagaaacgtattagatggaggttcaagcactgcattaagatgtaattctgttggatcatatggggctagcagtggtgcaaaaacagcaataacaaccataaataaaacaataatgagtcctattagaagaatt

SEQ ID NO: 2999 - DNA, 200 bp, Lawsonia intracellularis
atatgttgttgaacaaacctcataatataagtcatcttatggctccctgacgaatacgaggatcagctatgccataacaaacatcagccaaaaaattacctaaaagagttaatattgctcctaatacaagatttcccatgattaatggataatctcttgccataacagctgtataaaaaagttgaccaagtccaggtaaa

SEQ ID NO: 3000 - DNA, 200 bp, Lawsonia intracellularis
gcaaaaatactttcaataatgacactaccaccaatgagtcctggaacagaaagaccaagaagtgtaatgacaggaagtagggcatttcttaatgcatggcgaaaaataactttccatgtagaaagtcctttagcttttgcagtcaaaataaaatcttgacgtaacacttctaacatagacgctctcataaagcgagaaat

SEQ ID NO: 3001 - DNA, 200 bp, Lawsonia intracellularis
acctgctatgctgcctacagtcatgacaattattggcaatactaagtgggaggcaacatctttaatttttccccatagagaaagatatgaaaagtctaatgatgtaattccagaaatagggaaccattgtagatcaaggccaaaccacaacataagtaataaggctaaccaaaaacctggcatagcaaaaccaagaaaaa

SEQ ID NO: 3002 - DNA, 200 bp, Lawsonia intracellularis
caagaatagttatcaacttatcaaataaactatcctgtttccatgcagataatacacctaaagggatagctatcattaatgaaattgctaatgatagaacattcataaatactgttaaaggaagacgttcaaaaatcttcacaataacaggtcgtgcatcagcagacattgatgttccaaaatcaaatcgaataattctt

SEQ ID NO: 3003 - DNA, 200 bp, Lawsonia intracellularis
gataaccaatctatgtattgaacatatattggtctattaataccataaagagactctaacctttgtttagtagtttcaccagccattggatttaatgttgtttgtaagtctgttggacttcctggggctaagtgaattacaataaaactaacaatagtgattccccaaaggactactagtatccatagtattttttttat

SEQ ID NO: 3004 - DNA, 200 bp, Lawsonia intracellularis
aaaatataagataagtgattttgtagactgatacatcatatataacccattacataggacacgttattgactttaatgtattttaaaatgtttagtttttatttatacagaagtagactataatcaataaaaagtactatagtaaatgtattggtaaaaaagtaattattaaataattcatagtagtcttttattcactc

SEQ ID NO: 3005 - DNA, 200 bp, Lawsonia intracellularis
ttaaaaatccaagatataagttctttcttttctatttcccattcagaagacaaacgaacatgaagaaaatttttatagcatatatcaataaaatggagacatgtctctataagataaattttttctaaaaaaacagcatctggctcatcagaatctaaagatacttttggtgtttgaaagtttccaaaagaaaaattctc

SEQ ID NO: 3006 - DNA, 200 bp, Lawsonia intracellularis
agctttaagtgtcaattgccatgaaagttcatctttttcaaaacgtagtagagcacgtgtaactttttttcctgtttgtaatccaattcgtgcttcccttaaaggagaataaggaccaaaaactgttgctgtttcaagcgattcaccttctccaccttgaacaacaactctttgttccatagaaaaagtaaataattgtc

SEQ ID NO: 3007 - DNA, 200 bp, Lawsonia intracellularis
ctttactatccttaaaacccattggttttgtttcacttataaaccataaccaagtaagaaactcttgccctagaagaatatctattccctgtccaagatattgttcactcatatctatatatctctaaacaaattttgtaggttcaagggtatctatttgaataatagaagaagtatcaagtaatgatacagccaaatta

SEQ ID NO: 3008 - DNA, 200 bp, Lawsonia intracellularis
tatggtgtctgtaactctaagtgtaaatcgaatgtcaatgtgaaaaaagttgtgaataaatcaatcaactttatatgagtagaactaagatatactatattagttgtggttgaccatacaacatcaaagacagcagggataggtaaaaaatgtttaaaaagacgaagccgtacttgttcatgtaactctgactttctttc

SEQ ID NO: 3009 - DNA, 200 bp, Lawsonia intracellularis
ctgagaaagaaactttttccctgtgagttgaagattctttttttctttttgaagtgctatagctaagtgtttttttaaaacagctggtggaattctacgggtctctaaacgtaaagcaaaggctaaatattctcctttttctggatggcttatattccaatttacatcaagcatatcatcaaaatttgtccaaccccaag

SEQ ID NO: 3010 - DNA, 200 bp, Lawsonia intracellularis
accgctcttgacttgtatcatcaatatcttgaaaggcatattgttgaagcttttctggaattttttgccatagttctgaagaaaccttttctattattttataccgtgtaaaactacaacttgaacgaagaaatcccatctagtactacctataattataatttagttaatatgcttacgcatccaaaaaatatttggca

SEQ ID NO: 3011 - DNA, 200 bp, Lawsonia intracellularis
agcataagttttaaatgtcccataatgtatattatgtaaacttttattcatatctctttttttacaaaaaaaaaaaaattccctaatataaattgtcaataatgccgacaagagaattgcaaggtgttcagacaagattttattaaagaagggctttacaatgagataccattattctttatcagttattctaaccatac

SEQ ID NO: 3012 - DNA, 200 bp, Lawsonia intracellularis
ttcttacattttctatggttacgagtacacttgcaattccaaggacagaaaaagatttacagtatattgcaaacaatcttacagagacacctgtaaaatatggtgatattccatctatcactcaacctgaatatatatcagtaaatgatgcaaaccttactcttgaaggacgtgatcctgtatttatagtattcattcca

SEQ ID NO: 3013 - DNA, 200 bp, Lawsonia intracellularis
ggttcacaaccacgaatctatcctcaaagaattatggtatggcatgaggttgttaacgagtatatcaatgggaaaagttatgtcataacctactctcctatttctggttcaatggctgcatatgagtcaacaatagaaggaatgaatcttatttttgatactgaaggaaaactttttaatagtacaagcgtattaatcga

SEQ ID NO: 3014 - DNA, 200 bp, Lawsonia intracellularis
tagaaacacaggaagtctatggagtcaactgataggaatggcctttgacggtccacttaaaggaaaaggattacgatatattgtttcttggtggacaacatgggataaagccaaagagatgtatccaacagccttagtcctagctacaccaagaggaacaaataaaccctatggtagggatccatatggttcatatgtaa

SEQ ID NO: 3015 - DNA, 200 bp, Lawsonia intracellularis
cccatggcaactattatgacgatgaacgtattgtatatccagtagttcaacaagataaaaaacatcaacttcatcctaaaacaaaggtacttggtattgaaattgaaggcttacccttagctattgatgaagcttatgttaaagagaaaaaagttgttaacttctactttggaccatatgcattagttgctttatatgat

SEQ ID NO: 3016 - DNA, 200 bp, Lawsonia intracellularis
tctcgattagatatagtgagagtctttaaccgtgaagtttgggataaacaaatattgtttactcaaaatccacaaggacttcttgtagatattgatacaaatacaatatggaactatgatggaatagctatacaaggtaaactaaaagatgcttctatctctgagttctttggtataaatgcattttggttttcttggta

SEQ ID NO: 3017 - DNA, 200 bp, Lawsonia intracellularis
tgcttttaatcctgagtctcttcttgtaccaggatcaacggttgtacctagctcagcacttataaaaaatgctttatttctagaataacattactttatattctggatacacaagatagttatagacccagcacaaattgtctttctaagaatactattgagggaatatgtataaataattccttcaatagcattctttt

SEQ ID NO: 3018 - DNA, 200 bp, Lawsonia intracellularis
ttataaacgtctgaaaaaaagaaaaacctttctttgcagtacaaaaaaataggccatagtttataacaaaagaaggaatatctaagttacgttcaggcacacgataatcaacaagtattgcataggaaaatgttttaagtgtatcaacaagttctgagtgaatttctggtgctgtctgactaaaactaaaaagaaatagt

SEQ ID NO: 3019 - DNA, 200 bp, Lawsonia intracellularis
ataaggttcctctttatagattgatattcctttaactctatagagtcattattctttatcaaagaagatatcttcctatattttttgatacaatgagtagaagtttcataaagatgccatttagtatgatcaaaaatagtaatctttgatgtaggtatcaaaacgctactactatcaattaatgctattatatgagaaaa

SEQ ID NO: 3020 - DNA, 200 bp, Lawsonia intracellularis
tatgaatgaatgaaatatttgttgaaaagtaaacatgttatagagattcttctatcatctttgtaaataaattacgaatattctgaaatgtattacagttaggaagcgtgtctaataatacagagatgctacttgaagatgcaaatagtctttttgtaataggaaatgttaactctcttatccaagaaagtataaccatt

SEQ ID NO: 3021 - DNA, 200 bp, Lawsonia intracellularis
ttaaaatcattgagatatataagatctaaataacttggtgttcttccttccaaaatatcttgcattaccttatggttccactttaaaggttcatcttttaaaaaaagggttacttcttttttttgtgatgtaccatccatgtgtgatgaaacaacacgcaagatatctaacttatcagcatcccttaaaattgtagcagt

SEQ ID NO: 3022 - DNA, 200 bp, Lawsonia intracellularis
tagctgaattttgttatctaactgtttaggtaataatttacgattatgtagtaccatagctgataaacatactttttgtataatttttatttcttcttcaagaaatccatacttttttaaaagttgaacacttaatgttgcatgatttatagactcccaatcattaaatgttctccacttgataaactgaggaaatctcc

SEQ ID NO: 3023 - DNA, 200 bp, Lawsonia intracellularis
ctatatcatgataaagagccgctaataaagctcccctactcactatattagaaaactcttcatattgaagaatcatttttacattatctaatacatgctgagtatgctcgtactttagtttaagtaaataatgtgagtctactgttatgtattggttaacaaaggattcaaaataggctttatgagatgcaatatctaga

SEQ ID NO: 3024 - DNA, 200 bp, Lawsonia intracellularis
ttatgcactgtaatctttcttgtatccataatgtatattaaaaaaatccaattaaaatcataacaaaaggaacgttgagcatttcttctttttttgttagttagttagttaaataaatatatatgaaagtcctgtaaacttttaataactctttataattatttgataagtaattaattacatattaccaatataaatac

SEQ ID NO: 3025 - DNA, 200 bp, Lawsonia intracellularis
ttcaactactttattaacacaagataatgtgagaatatttttatgtctaattttgttcatcttcactgtcattcagaatatagccttctagatggtgctattcgcttagatgccctgtgtgcacgtactaaagaatttgggatgcctgctgctgctgttacagatcatgggaacttatttgcagctacacatttctattc

SEQ ID NO: 3026 - DNA, 200 bp, Lawsonia intracellularis
tatctgtaaagaatatgggataaaacccattattggctgtgaggtatatgtaacaaaagatcatgctgataaactttccaaattttccaaagccaggcatcaccttatcttactagcaagaaataaagaaggataccataatcttgtcaagcttgtaacacgtggatatcttgatggattccactataaacctagagtag

SEQ ID NO: 3027 - DNA, 200 bp, Lawsonia intracellularis
ataaaacattactaaaacaatttagtagtggtattacagcattatctgcctgtttagctggagaattaccacgtacaattatgggaaaaaacatatttgtagaaaaaggtggtacatttgatgatgccatttctattgctcaagagtacgcttctatctatccaggacaattttacttagaagtacaagcaaacatgtta

SEQ ID NO: 3028 - DNA, 200 bp, Lawsonia intracellularis
cctgagcaacaaaaagttaatgaaaaactttatgaattagctgaatatacaaacttaccattagtagcaacaaatgattgccattatcttaatgcagatgatgtagaagctcatgatattctcctatgtgttcagacacaggctaagtttaatgatactgatcgaatgcgttttaatgctacagacctatactataagtc

SEQ ID NO: 3029 - DNA, 200 bp, Lawsonia intracellularis
atctgaagaaatggagaaagcattctcccatcttccaatagctattgaaaatacaataaaaattgctgaatcatgttctgttgaaatggatttttcaaaaaatctttttccagtctacgagttacctaaaggggtaacgcctgatgatgaattccgacgacttgcacgtgaaggtttacaaaaacgattagaagtatacc

SEQ ID NO: 3030 - DNA, 200 bp, Lawsonia intracellularis
caaataaaaaacagttaaccacagaaaactactggaaaaggcttgaacaagaacttgatattatatgtaaaatggggttcccaggatactttctaattgttcaagactttattaactgggcaaaagataataatattcctgtaggacctggtcgtggttctgcaacaggatctcttgtagcatgggcattacgtattaca

SEQ ID NO: 3031 - DNA, 200 bp, Lawsonia intracellularis
aacattgatccacttccttacaatcttctctttgaacgatttttaaatatagaacgtattagcttacctgatattgatgttgacttctgtgaagataaacgtggagatgttattcgctatgttatgaacaaatatggtgtaaactctgtagcccaaattacaacttttgggaaaatgaaggccaaagcagtagtgcgtga

SEQ ID NO: 3032 - DNA, 200 bp, Lawsonia intracellularis
tataggtagagttttggatatgtcttttaaagagacagataatatcgcaaagttaataccagatgatttgcatatgactattcttaaagcaatggaagttgaaccaaaacttcaagcattatacaatgaagagcctcatattaaaagacttcttgatatctcaatgaaacttgaaggccttgttcgtcatgcttctaccc

SEQ ID NO: 3033 - DNA, 200 bp, Lawsonia intracellularis
atgccgcaggtgttgtagtctcagataaacctatggatgaataccttcctctatatcgtggtaaaaaaggtgaacttgttactcaatttgatatgaagatggtagaaaaagttggacttgtaaagtttgactttctaggcctacgtacaatgactctcatccatacaactctcaaaacaataaaagaccaggggaaaatt

SEQ ID NO: 3034 - DNA, 200 bp, Lawsonia intracellularis
cctccaaaccttgatacacttcctttagatgatcctaaaacatatgagcttctttctaaaggagatactgatggtgttttccaagtggaaagttctggtatgcgtcaatacctccgaatgcttaaacccaactgttttgaagatctcattgctatgcttgcactatatcgccctggtcctcttggttccggtatggttga

SEQ ID NO: 3035 - DNA, 200 bp, Lawsonia intracellularis
tgaatttattaagcggaaacatggaacagtaacaatcgaatatccccttccatctttaaaggattgcttaaaagatacatatggcgttattgtttatcaagaacaggttatgcaaattgctcaaattgttgcaggatattctcttggagaagcagatcttttacggcgagccatgggcaaaaaaaatcctgaagctatgg

SEQ ID NO: 3036 - DNA, 200 bp, Lawsonia intracellularis
caaaagagcgcactcgctttgttgaaggtgccataaaaaataatgttactgaaagtattgcttctgatatctttgatttaatggaaaaatttgctgaatatggttttaacaaatcacattcagctgcttatgcacttatttcttatcatacagcctatttaaaagctcactttacattagaatttatggctgctttatta

SEQ ID NO: 3037 - DNA, 200 bp, Lawsonia intracellularis
acatcagaaagtggtaatcaaaacaaaattcttaaatacactgcagcctgtaaagatatgggtattgatatactaaaaccagatatccaaacaagttgccgagaatttatagtaaaagataattctatagtttttggtttatgtgccataaagaatgtaggtgatgatgctatcgagaaaataattactacacgaaaaaa

SEQ ID NO: 3038 - DNA, 200 bp, Lawsonia intracellularis
agatggcccttttctttcattactagatatgtcttttcgggtaaacctaaaaaaagtcacaaggcgtgtgttagaaagtctcgttaaaggtggtgcatgtgatagttttggatgctcaagagctggtatgctaacagccttagataaaattattgctagaacatataaaaaaattaaagatgagcagtctaatcaaggct

SEQ ID NO: 3039 - DNA, 200 bp, Lawsonia intracellularis
cattattagcatttgcacctaaaatagaatctgtatctcttccagggattggctttacttgtgaagaacaaaatatgcctgaatgggatgaggatgaaaaactgctttatgaaaaagaggcactaggtttctttctaacaagccatccactacaaacatatagacaagaaatttatcgcttaggacttcaaccacttgaa

SEQ ID NO: 3040 - DNA, 200 bp, Lawsonia intracellularis
gaagtaagagaaatgaatgataaaattactattaaatcagctattattgtcaataatattagagaaattctgaataaacgtggcaatcgtatggcctttgttcgcgttgaagatctcacagcttctgcagaagttacttttttctcagaagaattacaaaaaagtcgtgaattactatcttcaaaccaaccactattact

SEQ ID NO: 3041 - DNA, 200 bp, Lawsonia intracellularis
cactgcaactattgattctcgagaatcaacacaaaacgatactattgatgaaagtgacgacacccaattacgatccattaaactcagagcaatttctgtagagagtctatcaagtgcttgccaaaatagtgaactacccatatcctattatgttgataaaaatagacttacaacttctggaatagaagaattaaaagcaa

SEQ ID NO: 3042 - DNA, 200 bp, Lawsonia intracellularis
tacttgataaacataaaggacaaactgaagtccatctcattttctctcttgataatattaattgtcaagtacgtctcggatcctcttggaatgtttctcctagtccagcatttcaacaagatatgtatcgttggagtatagcaagtgaataaaaaaaggaatagataagttatgtcaaaaccaacttggcacctaaccgt

SEQ ID NO: 3043 - DNA, 200 bp, Lawsonia intracellularis
acgttcagaattttgtgcagctcatgcattacgtcattataaagggaaatgtgaacggctacatggtcataactatggtattaaaattattgtaggaggacatgagcttacttctgacacagagcttcttattgactttacagagcttaaagcaatacttaaagatgtacttgaacctttagatcatagatatctcaata

SEQ ID NO: 3044 - DNA, 200 bp, Lawsonia intracellularis
atattcctccctttgatcaaataaacccatcagcagaaaaccttgctagatatatttggcaaaatgttaaaaaacgtctcccaccaaacgtctatatggttcaagctactgttgctgaacgtaatgtccaatctgcaacgtatatggaataacttgtttaagcacctatgctctactcaataaatcataggtgctctcaa

SEQ ID NO: 3045 - DNA, 200 bp, Lawsonia intracellularis
aaataagaatatgtaaagtaagttagtagctataattaagatatacatcttattcaatataagctcaaaaattaatctaacttatcctatttcacgacttattatcaatttgctccacaaggaaagtctctagaaccacacccttctctaccacaaccacctatagagtttggtgaaaaatgagacttgcagtctgagtc

SEQ ID NO: 3046 - DNA, 200 bp, Lawsonia intracellularis
agatatagtaactctttttatattagcagctgaaagaatccgttgtgtattctgactactacagttaggacatgataaagaaatagattcaaaatgtgttacctcttcaaatgggtgtccacattggatacaaatgaaatcatataatggcataaattcatcctttgttcttgattcattataaaaatagcaatactgat

SEQ ID NO: 3047 - DNA, 200 bp, Lawsonia intracellularis
taaacaagtaattcattgtattataaaagcaagaatgtatcttatgtagatatacattaaacaaataaaaatggctaccctccctagaataaaagaaaaagtaatatgttgttaatctcttatagactaataggttattattaatgaaagatgagcaaaaagaagaaaaagacaaaattatctatacaagtacaatgaaa

SEQ ID NO: 3048 - DNA, 200 bp, Lawsonia intracellularis
gaaaaaaaacgtcggcatcgtttgtatgaatttcttttagcttttgcgctcattttattaattcttggtggaacatggacacaacttgccttttatggtgttgactcttggatttttattgttcttttaaatattaactccatcttcatgcttatagtgcttttccttgtcacaagaagtattgttaagcttatcatgga

SEQ ID NO: 3049 - DNA, 200 bp, Lawsonia intracellularis
gagaagacgaaaagtttttggtgctcaattaaggacacgtcttgttcttatttttgtatctttatctcttattcccacagtaataatgtttcttgcttcaaataaagttgtagccacaagtgtagattactggtttactaaaaaagcagaaagctccttacaagcagctcttgatgttggccaaagcttttatgtggctg

SEQ ID NO: 3050 - DNA, 200 bp, Lawsonia intracellularis
ctgctcagagactaagaacacactctgagtctattcttacaactataaaaaaagataagcttatttggggaggctctggaatagatactttacttcaggacaaacaacaagaatatggattaacgtttataggtattatcaaccctcaaggtatagagcaacattggtatggacaagaaggtacattaagtatctggaaa

SEQ ID NO: 3051 - DNA, 200 bp, Lawsonia intracellularis
aaaataagagaacgtattgactggaaccatgtggcaagtaacaattttagttcattactttgggcaacagatcatgcggactacgtttttggtgttcttgctattgataatgggagatctggctatcttattacagcagaaagtattggacaaggattgctcacaaagcttgatcgcatctccaacgggtttgaagaata

SEQ ID NO: 3052 - DNA, 200 bp, Lawsonia intracellularis
tacaagcctcaaacagctcaaaaagcctcttaaaatctcattcttactcatccttggcatactgagtatgattatcatttttggttctgtatggtttggttttcgactttcaaaagaaattaccgctcctattctagcattggctgatggaactactcgtattgctcaaggagaacttgatgttagacttatagatgaag

SEQ ID NO: 3053 - DNA, 200 bp, Lawsonia intracellularis
gacaagatgaacttggactattaattaaatcctttaatagaatggctaaagatctgcaacaaggtcaaacaaatctcaaaaaagctaatgaacttcttgcagaacaaaaagatacacttgaagaacgtaataaatatattgaaacagtattagacaatattacaactggtgttattacacttgatgtttttgggtatatc

SEQ ID NO: 3054 - DNA, 200 bp, Lawsonia intracellularis
cttattgctaataaagcagcttgttctatttttaatacgtctcagcattttttaaagggtcgttgtccagctaactttcttcctccccaatataaaaacatcttctattcgatgatcaatcaattacaaaaacatcctgatttacactggaaaacacaagaaaattttattcttggtgatcgccaatggaaattagttat

SEQ ID NO: 3055 - DNA, 200 bp, Lawsonia intracellularis
acatgctgtagctattactggaatcgatggcatccaggcatatgttgttgttattgaagatatcacagaactagaaaaaatgcagagaatggctgcttggcgtgaagttgctagacgtattgctcatgaaattaaaaatcctctcactccaatcaaactttcaggacaacgattagataaaaaatttggttctcagattc

SEQ ID NO: 3056 - DNA, 200 bp, Lawsonia intracellularis
aagatcctgtttttcaacaatgtacagaacttattgttaaacaagttgaaagattacaagatatggttcaagaattttcttcatttgctaaacttccagaagtaaaacttagttctggtgatattcgtcctgttattacagaattacttgaactttttatacacaaccataatgagatcaagtggaatgtatatattcca

SEQ ID NO: 3057 - DNA, 200 bp, Lawsonia intracellularis
aatacacttcctgaaattttaatggatgcatcagcgttacatagagcattgttaaatgttattacaaatgcagtagaagcacttgagtatagtcaaaacattgaaaaaaaatgtatagaaataactataacccatgatcatacaaaagggataatatctataaaaattgaagatagtgggataggtcttgctcccaatga

SEQ ID NO: 3058 - DNA, 200 bp, Lawsonia intracellularis
aagagaacgtatctttgatccatacttctcacgtaaaaaaggtggtacaggtttagggttagctattgttaaagctattattgatgatcataaaggaactattaaagtttttggttcatacttaggcggtttaaatattgaaattgaacttcctatagtaacttcacatgttgattttactcaatcaatataaaataaat

SEQ ID NO: 3059 - DNA, 200 bp, Lawsonia intracellularis
aatatatagaaagcctcttaataaattaagaggctttctatcattgacttcattctatagaatttatttctttttttgaggaatagatgaacgtccagagtgatcataacttgtaacttgacctgaacccaatggcttacgtcttggattttgtttaaggtgttcaatagcacgatgtatatcatttactaaaagatcgg

SEQ ID NO: 3060 - DNA, 200 bp, Lawsonia intracellularis
ctaaatcatgatcaaaaccatgacgaacaaggactctcattacaacaagatcagtccgattagcaggcattgaatatgctggaacttgccatccacgagttcttaaacgatctgaaagatcatataaactaaatgggtactttttttcatctttaagtgtccatgttaaagctggtatacctgttttaccaccatacaaa

SEQ ID NO: 3061 - DNA, 200 bp, Lawsonia intracellularis
attttaaaaattccagtctttgtcaactcattggcaaggtaatctgttgtatcataacaagcctgatgaatacgacgatatccctcacgacctaagcgaagtaagttataatattgacaaactatttgtcctccaggtctagaaaaattaatagcaaatgtaggaatattacttcctaaatagtttacccaaaaaataag

SEQ ID NO: 3062 - DNA, 200 bp, Lawsonia intracellularis
atcttcaggtaaatcagttttctctctccatacaacccagcccatacctaaaggtgcaagtccaaacttatgtcctgaagagttaatagattttacacgaggtaagcgaaaatcccatactagctcaggctcaataaatggtgcaagaaatcctccacttgctgcatcaacatgaatgggaatatcccatcctttcttct

SEQ ID NO: 3063 - DNA, 200 bp, Lawsonia intracellularis
tttgtaatgcatctaatgcattactaacctcttctacaggttcatactgacctgtatatgttacacctaatgtagggaccacgcctattgtattttcatcacagcgtttgatggcttcttctggtgacataataagtctatttttttccatgggaatttcacgtaactcaatatcccaatagcgagcaaatttatgccaa

SEQ ID NO: 3064 - DNA, 200 bp, Lawsonia intracellularis
cagatttgtacaggtccacatactaagttaggcttatctgttgattttccagctttttttctttgtgccctccatctccactttaatgccataccaccaagcatggctgcttcactagaaccaatagctgaacatcctattgtatttgttggatctggggaattccaaagatcagctaacatatttacacagcgcatttc

SEQ ID NO: 3065 - DNA, 200 bp, Lawsonia intracellularis
cagttctgctgtctgtggatattcatccttatcaatcatgttcttagcaacacattcatccataagtttatggatttcaggatcaacccaagtctgacaaaatgttgcaagattttgccgtgcattaccatctagcataagctcatcatgaacagcctgataaatatctctaggtctatgctcatacagtggcatttgat

SEQ ID NO: 3066 - DNA, 200 bp, Lawsonia intracellularis
acttaggtaaggtttgactaagatcatcttctgcaaaaacatcatctaataattcatgacgtaccacaccattactcatggatgatttttgtgtcctattccccatagatcctctttttgttccatgccccacaggcattttttttactacagcctttcttgcagttgccatgtaattatctccttcataagtaagctgt

SEQ ID NO: 3067 - DNA, 200 bp, Lawsonia intracellularis
tatttaagaaaatgcttaaccattagttattcttgtgatcgctgttctttccatgaaagttttttcatgctatttataattaaaggcagtccaataaaaacgatcattccagatgcaacaagagttacatataattctggatttccaacaggtagatttgttggagggaaaaaacccactattgtagcaaatgctactcc

SEQ ID NO: 3068 - DNA, 200 bp, Lawsonia intracellularis
taaaaaacctattcctgctactataaacattccaataattccaccaggaattttatatactcgaggaagatcaggttgagtaattctaagataaatagcagcagcaaacattagcatatacattacaagatacagtgtaactgtcattgcagataatacaaagaaagcaacacttacattatctataataaaatataagc

SEQ ID NO: 3069 - DNA, 200 bp, Lawsonia intracellularis
aagctaaaatagatactataatagcttggattattaaaatagttactggagaaccatgcttatttaccttagctaaaaaaggaggaatttcaccttgttgtgcggtagcaagtagtcctctacttggtcctgtgacccaagacataactccaccaatagatccaaaagccataagtaatccaaggataggggtaagaata

SEQ ID NO: 3070 - DNA, 200 bp, Lawsonia intracellularis
cttaacttatagtgagcaaaaagtacttgaaatgcctgcataagcccagcagttaaactcaattgatcagctggtattacaaaagctacagcaagtgaacctaataggaataaaataaaaattattatagcagcaataagcattgcaaaaggaaattgacggcttggattttccatatccacgacttgcacagcttgtac

SEQ ID NO: 3071 - DNA, 200 bp, Lawsonia intracellularis
ctctactccagcaaaaagaagaacaatccctgcaagaaatgcaatactaccaagacctacgatatgaggaaacagcacaggatgatgatgctcaacaactgtttgtcctgaacttaatgttattgtttctataaacaaagcattatcatttccttgaaatatccatagtgcacctaagacaataataagtgctcctggaa

SEQ ID NO: 3072 - DNA, 200 bp, Lawsonia intracellularis
gcagtgttccccatacaacaccatatttagcaacagagtttactgcttttgatccattcaaagccacaacggttgcacaccaatagacaattagcgtgacaatcccagtataagtaccactagcagaaagttcaggagacataaaaaaatatgctaaacatgatgatgcaaatccaagcactgttggataccagacaacg

SEQ ID NO: 3073 - DNA, 200 bp, Lawsonia intracellularis
ttttgtatccactgtaaccaaatagctgtaaagccccatcgagaaccaaaagctgcttttacccaagcatatactcctccagacttactactaaaagcacttccaagttctgcagataccattgcagcaggtagtaaaaagataacagttgaaaataagatataaaaaatcattgaaaggccttccttagccatcattgg

SEQ ID NO: 3074 - DNA, 200 bp, Lawsonia intracellularis
gagcccacgaagactcacaacagctgcaactgtcataagagcaagagttgtaacagttacatgctttactgaatttctttccataagaaaaaccccttttaagttacaatataactagtatgctttctattaggttacatcttatttttattatgttataaaaataatgtataataactgtaaatttgataagtatattc

SEQ ID NO: 3075 - DNA, 200 bp, Lawsonia intracellularis
tatataatatcgtatgtattagatgcatattattttcattacaatctttatatgtatcattcaagcgtatttatattattgaataatcttttatcattataaaatataataatatgttatttaatatattatttagaaaaaataaatatacaatgaatatttggaatgttgtttctattggtataggatcaatggtagga

SEQ ID NO: 3076 - DNA, 200 bp, Lawsonia intracellularis
gctggaatatttgccctattaggccaagctattcttcttgttggaaaaaatgcttttatttcttttattcttgcaggaattatatctttactatcaggttattcatatgcaaaacttgcatcaagatacccatcttcatctggtattttagagtattataataaaggattttcatcaaaagtgatttcaggaggattttc

SEQ ID NO: 3077 - DNA, 200 bp, Lawsonia intracellularis
tcttttatacctgtttactcttgcaatatctatttcaatggtagctaaaacttttggtttatatcttgccgtaatgatatctaataactaccaattatctataccagatagttatctttcagacatcttttctacaatcattatcattactattttccttttaaacacaaatattgctaaagaagttggaaaagctgaaa

SEQ ID NO: 3078 - DNA, 200 bp, Lawsonia intracellularis
caacccttgttggaatcaaagtaattatcctaagtatattagtcattgcaggtctttcaactatagatattgatatcattattaataaaccatcaagttcttcatttagtataataggaagtgttggattaacattctttgcttatgcaggctttggaatgatgactaatgcttcaggagaagtaaaaaatcctaaaaaa

SEQ ID NO: 3079 - DNA, 200 bp, Lawsonia intracellularis
acaattcctagagctatttttattgctatcctttttgtcatgtttctttatactaccttatgtttagttgtacttggtaatattcctttagaagaaataaaaaaacatgcagatacagctattgctattgctgcacggccagttttaggtaatgcaggattctttataatctctgttgtagcgttacttgctacagcttc

SEQ ID NO: 3080 - DNA, 200 bp, Lawsonia intracellularis
tggtattaatgcaatgatgtttagtgggataaggattgctaaaggtatggctgaaaaaaaacaactaccatctatctttttgaaaaaaacaaaatttataggtaatggtacaattggaatgacatactcaatcataggaattattataataacaaacatttttaacttgcaatcgatagcaaatatggctagtataatat

SEQ ID NO: 3081 - DNA, 200 bp, Lawsonia intracellularis
ttttgttatgctatttagctgtatttattgctaactggaagcttaggaaagaaactcaatctttaaaattgcttattgttattggtattgtttcaatgtctgctattttactttcatttatatatacaattattcaaacaacacctatgacttctattcttcttttaatatttttagtcttttctttccttttagagtat

SEQ ID NO: 3082 - DNA, 200 bp, Lawsonia intracellularis
tttttgataaagtatgttacataattgattaataaatagtaacttattatagtttttatatatctttctatataacttgtaattttttgttagcctagctagattattttgcttaatagcttgaaaaaaacatttcttcttgcattatataaatatttgcgataggaaccgttaagcagattttatattattaaataata

SEQ ID NO: 3083 - DNA, 200 bp, Lawsonia intracellularis
cattcttatcgtaaacaatatcaatatgttaagattcttctgtattcagagtttctgtatcaagtaggcttgtacgtgagttttctcgttctggctttagccagttttacccaccttaaaacagtaataatggactcctatgcggaaaaagaaaactccccctgttgaagaagttcaagaaggcactactatgagcctta

SEQ ID NO: 3084 - DNA, 200 bp, Lawsonia intracellularis
ctgaacttaagactatgaatatgccaaagctaatggagcttgcagaggattatactatagaaaatgcaagttctatgaggaagcaagaacttatctttacgcttctgcaggcttgtgcatcacgtagcggtggcatctatggagatggtgtattagaaattttatcggatggatatggttttttacgctctcctctctct

SEQ ID NO: 3085 - DNA, 200 bp, Lawsonia intracellularis
agctatatgcctggtcctgatgatatttatgtctccccctctcaaatccgaagatttcacctgagaaaaggagatattgtatcagggcaaatccgcccaccaaaagaaggagaacgctactttgcattacttaaagtaaaagaaattggatatgaagtacctgataatgcaaaacatattgttctttttgataatctaac

SEQ ID NO: 3086 - DNA, 200 bp, Lawsonia intracellularis
acctatttatcccaaccaacgattattgatggaaaatagtgataaaaattattcatgtcgagttattgacttgatgtctcctattggacgaggccaacgtggacttattgttgcacctccaagaactggtaagactattcttttacaaaatattgctaattcaattaatgcaaacaatcctgatgtatatcttattgtct

SEQ ID NO: 3087 - DNA, 200 bp, Lawsonia intracellularis
tattaattgatgaaagaccagaagaagtcacagatatggagcgtacagttaacaatgctgaagttataagctctacatttgatgaaccaccacaacgtcatgtacaagtctgtgaaatggttcttgaaaaagcaaaacgacttgttgaaagaaaaaaagatgttgttattttattagactctattactcgtttaggtcga

SEQ ID NO: 3088 - DNA, 200 bp, Lawsonia intracellularis
gcatataatgctgtaacaccttcttcaggtagagttctttctggaggccttgatgccaatgcactacagcgtcctaaacgttttttaggagcagcaagaaatattgagggaggaggcagtctaacaataattgccacagcccttattgatactgggtcaaggatggacgaagttatatttgaagagttcaaaggtacagg

SEQ ID NO: 3089 - DNA, 200 bp, Lawsonia intracellularis
taatatggagatctatcttgaccgtcaccttgctgaaaaacgtatatttcctgctattgatattaatcgtactggaacacgtaaagaagatcttctattaccagaggatgtattaaatcgggtttggattcttagaaaacttcttgcaccaatgtcgtctattgatagtatggaatttctccttggtaaaatgcgaggaa

SEQ ID NO: 3090 - DNA, 200 bp, Lawsonia intracellularis
caaattctaatgaggactttattaacgcaatgagtaagtaataaagcaatgaataatagcttgtagttaatattttaaagaatacttcattccattaaccgatcattaactaaacacaaaaaagtctgttaacaactaaacagacttttttaatttaaacttagtaacaatcaggtatcaattttaaagggagagatctc

SEQ ID NO: 3091 - DNA, 200 bp, Lawsonia intracellularis
tctcaaccgctctataattgcaggtaattctttaacaactatattaacttcgtcagctgtagaataacgagacaacgaaaaacgtatagatccatgtgcatatgtaaatggaacacccatagcacgcaatacatgtgagggctcaagactaccagaagtacatgctgaaccagaacttgcacaaataccatgttgatcca

SEQ ID NO: 3092 - DNA, 200 bp, Lawsonia intracellularis
ttaataatagaatagcttctccttcaatattcctaaatgaaatgtttgttgtgtttggaactcgattatctatatctccatttacaactgtatctgtaatagtaagtatctgtttttctaaattatcacgtaacacctttatatcatcaccattagttttttctaaataatcctgagcaagttcagctgctttcccaaga

SEQ ID NO: 3093 - DNA, 200 bp, Lawsonia intracellularis
ccaatcacataaggtacattctctgttccagcacgacggttaaactcttgatgtccacctcttaaatatggtctatatcgagttcctgtcttgacataaaatgctcctatccctttaggtgcatgaattttatgccctgataaagaaagataatctatatttaaggccttaagatctacaggtatcttccctactgcttg

SEQ ID NO: 3094 - DNA, 200 bp, Lawsonia intracellularis
aacagcatccgtatgaaacaatacatctttttctttcacaatttcagcaatttgttgaataggaaagatagttcctgtttcattattagcatacataatagaaacaatagctgtattgtgtgttatagaagatcttaattcatctaaatctagtctacccttattatctacatctaagtaggtaactttatatccctttg

SEQ ID NO: 3095 - DNA, 200 bp, Lawsonia intracellularis
attcaagattgttacaaacagaaaggatagccgcatgttcaacacgtgttgtaataatatgcctcttttcagggtggagctgtatagcagaccatatagcagaagcatcactctctgttccacaagaagtaaaaaagacttcttctggttcagcaccaataagggatgcaacctgctctcttgcattttggatatatctt

SEQ ID NO: 3096 - DNA, 200 bp, Lawsonia intracellularis
ccaacagctcctccaaaagtatgcatgcttgaagcatttccataatactcactaaaaaaaggcatcatgacttcaacaacttcaggggctacttgtgtagtagcattgttgtcaaagtagataaccgtattcatgcattaacctcctcaacaataatgtcagaatcaacatgctcatgaagaattttctctataaattgt

SEQ ID NO: 3097 - DNA, 200 bp, Lawsonia intracellularis
gaaagtgtaatttgacgagacttacagcctgtacagttacctctcatagcgactgttactaatggtccattaacatcaataagttctacactaccaccatctgtttttaataccggatttatttcttcatctaaaagatgaagaattttttgcattctttggacatttgtaagaacaggtttagaggttgtttctttttt

SEQ ID NO: 3098 - DNA, 200 bp, Lawsonia intracellularis
taaaagaccttggagttcatcaagaataacttgaatatcttctaaacaatctccacaaccaccaccagcttttgtataatcagtaacctcatctactgttttaagatcattttctgccacagttttacgaatatgttcgtctgagacaccaaaacatttacatacaataacttcatcatgacaatgtggaccactagtag

SEQ ID NO: 3099 - DNA, 200 bp, Lawsonia intracellularis
cctctcctctccaattttttaaagctgcttcaagagcttcttctcccataacagaacagtgcattttttctctaggaagaccaccaagttgtgctacaatatctttattagtaatttttgatgcttcttcaacagttttaccttttaacatttcagtcaaaattgaacttgaagctatggcactcccacaaccaaaggta

SEQ ID NO: 3100 - DNA, 200 bp, Lawsonia intracellularis
agaaatgaagcatcttcaataacttcattttcattaatttttaaaaagagttttaatgcatccccacaagaaaggcttccaacttcaccaatagcatttgcgtcaggaagttctcctgcattcttaggacgaagaaaaagctctttaacagtatcagtatattcccacattacttattatcctccgatttgagcatgtat

SEQ ID NO: 3101 - DNA, 200 bp, Lawsonia intracellularis
cttttcattgtattacaagctttatctactctatttaaatatagtttaattctgtgtatcatttatgtaaacataagatcaaatgcttttaatggaagagggttatgaatatttttattttgtgaaaaaaacaacatcattactatagtataaaattatatttatatggttagagaacatcaaaaaaaataatatggact

SEQ ID NO: 3102 - DNA, 200 bp, Lawsonia intracellularis
tcttataaaataagattagttcgtgtatggtatctcaataaatgtactatatttttaactaagataaatataactagttcataaaattttaataatctagtaattaaattgtgaaaaaaacaacagactattttaggaaatatttagtaaaaaagttaacttgagcttgctaaataactagctaaagtaataagctgtta

SEQ ID NO: 3103 - DNA, 200 bp, Lawsonia intracellularis
ttcatagcaacttagtatagtaataactttttagaacttgtatatagtttttgattggaatgaaagaaaagctatcttgtttattatattaaagttatacctatagtaaaaatttttactataggtataacttagtgctgtaataataaaaaatattggcctagttgtactaataaatgaaaactatattaaataatctg

SEQ ID NO: 3104 - DNA, 200 bp, Lawsonia intracellularis
actataatgaaagtaagtactatttctatagtattatagctacctgataatatatgctatcccaataaacctattgctttttttcttcattatgaccaacaactcctccagctattcctccaagagctccaccaaggagagccccaattgtgccacttcctcctgcaatcgcacttataccagcacctacaagtgctcca

SEQ ID NO: 3105 - DNA, 200 bp, Lawsonia intracellularis
ccagcgacaccagtcaatgctccttgttgagttttagtaagatttgtacaacttgttaaaagtaaaaataaagctaatataactacagatattcctttcatattatcctctcaccaagtgttactttgtatttggagccataaattcataccataatacccatagaacatctttattcttttgtgtgggatgctctttgt

SEQ ID NO: 3106 - DNA, 200 bp, Lawsonia intracellularis
accatttatcaattttatgttggatgttcatccaagtatcatctttaaaagttttaatccatttttggacaaaaagagatggttttcttccttctttatgagctatttcttgttcgataacgacgacactagatactccataaagaaaagaaagcttctcgtttgttgatgatttctcccaatcacgaccagttaaatca

SEQ ID NO: 3107 - DNA, 200 bp, Lawsonia intracellularis
cattgtacattatttgctattgcaacaggtgtagttagtaagcataatgcaaaaaatagactacatatcattaaagcatatatcttcataattcctccttagatacacaataatgtattaagatataatgggatagtaatatagtctattatagtaatcaatatctttaaaaaaatattaaaacataatcttaatagaat

SEQ ID NO: 3108 - DNA, 200 bp, Lawsonia intracellularis
atatactataatgtcttagctactcttgcagttctattttcaaaacgtcggattgtaagatgacaaatagctgttgctaatgcatcgcttgtatctataggccaatctggtttcacaccaagagagcgtcctaccataaagcttacttgctcttttgtagctcttccatgaccaactaacgtctttttaattgttgtagc

SEQ ID NO: 3109 - DNA, 200 bp, Lawsonia intracellularis
ttcataatctttaattaatagcccttgatttgcacaagcaaccacagcagcacctctggcctgtccaagttttaatgctgttagtggattttgagctgtaaaaacttgctctacagatgcttcaacaggtttatatttcataataatagaacttatttcctgaaaaatatgtgcaaggcgctctgcaaatgaaccattac

SEQ ID NO: 3110 - DNA, 200 bp, Lawsonia intracellularis
aagatggttggataacaccacaacaaactaaatgtaatactccagaaacctcatggacaataccccaacctgtatttctggagccaggatcaataccaataacactaatcactatctatcccttattactgttagtctaaaaggcattaattagatataaaaaagtaatcaactatgtataggttataattcattcatta

SEQ ID NO: 3111 - DNA, 200 bp, Lawsonia intracellularis
tttcatcagggatatctacatttgaataaacttgttgaacgtcatcatagtcttctaatgcttcaagaagcttaacaacttttttagctgtttctatatccacagaaatcatattttgaggaatcatagcaagctcagctgactgcattattagtttatctgattcaaacgcttctctgactgtattaaaatcagacata

SEQ ID NO: 3112 - DNA, 200 bp, Lawsonia intracellularis
gaagtatgaatttcccatgtatctccttcatcatgaagatcatctgcaccagctgcaagcgctgcttccataagttcttcttcagaataggcagttttttcaaaaacaaaaacgcctttacgctcaaacatccaacttacagagccggattctcccattgacccaccattttttgacattatatgtcgtaaatctgctac

SEQ ID NO: 3113 - DNA, 200 bp, Lawsonia intracellularis
agaacggttacgattgtcagtagcaacttctataagaactgctacaccaccaggcccgtatccttcatacataatttctgttatatctccaccactatcttgccctgtccctttacggatagctgcctctattttatctttaggaaggttaatagactttgctgctgcaattgcagctcgtaaacgaggattacctgaag

SEQ ID NO: 3114 - DNA, 200 bp, Lawsonia intracellularis
gatcaccaccatttttagcagcaataatgatttcttttgcagcttttgtaaattctttccctctcttagcatcctgtcgacctttacgatgctgaatattggcccatttactatgcccggccatgaaatcctcctaattaacattcttctattacaatacacatctttacttttaagaagtagtaaatcttttaaaacct

SEQ ID NO: 3115 - DNA, 200 bp, Lawsonia intracellularis
aatccaacataaaatatttctttactttttgtacgagagctacaaggtttaaaagatgtaactctctcaaaatgctgccgcatttcttttacaagctctatagtatcagctcccataaatattttcacaataaaactaccttgttgtaatagatagcacttagctatagcaagtgcctctaggcataattcaagagatct

SEQ ID NO: 3116 - DNA, 200 bp, Lawsonia intracellularis
agaatgatctgtaatttttacccctgtcgtttgaggagccatatcactcattataacatgaaaaggaccttcttttattagtatattattaaatgagtctgaacgatgaaaaatatcttcttgaaaaaaagaaacattagaaggtaaagggatagttattgtttgaatatcacaagataccactctccctgtttttccaa

SEQ ID NO: 3117 - DNA, 200 bp, Lawsonia intracellularis
ctttttcagcagcaccaagggaccatgaacctggagatgctcctaaatcaagaacactcattcctttttgaaataaacaaaaacgattatctatttctttaagtttataaatagatcgtgcaggatatttttcatgtttagctttaagaaaataatagtctctatacggtttcatatgtgtaatatttttacatagatgc

SEQ ID NO: 3118 - DNA, 200 bp, Lawsonia intracellularis
tataatatatagcctatttatagcataatggtttattctatcatcctcaaaggggaatattatatatgagttctttgtattgtaatataacttacaatgatagaaaagttgtttttgatgagttaggtagaaaaaaaacattggcttctggaaaagacgactttgttgatctttttggtaactctataaaacagataagt

SEQ ID NO: 3119 - DNA, 200 bp, Lawsonia intracellularis
tttgataatcaccctatattattacttggtattggaccttttcccaatgcttggcaacaactctttattaatcaagaggaaaataaaaaaattttttggatagaaagtcctttgtttgaaaaacaaatgccagaagaatggcataaatgtattccagctcattggaaaaaaatatcccttaaagaactacttgaacttca

SEQ ID NO: 3120 - DNA, 200 bp, Lawsonia intracellularis
tacatttctaaaactatcagattgtcgtatctatcgatatctcccttcatatcgccttttttcaacattttggggcatggttgttggaaaactacaattaacacatcttaattatgcaccatctctttcatcttcttctatcattctatcaggaactgaaaaagaacttttaacctacgaacttaatatagcctgtcaac

SEQ ID NO: 3121 - DNA, 200 bp, Lawsonia intracellularis
aaattggttttactccactatactttcctcatcaaggaactctatcccaactttgtcaaatagttaaagaacaacaaccaagtttatttctttctattaatctgcaaggacttgatagtgaaggttattttttctacttattacaagcagcaaagatccctgtagcaatttggttagtagataacccatggcatgtactt

SEQ ID NO: 3122 - DNA, 200 bp, Lawsonia intracellularis
tctaaactccgatcaccttggtggaaagaagcaacactttttactactgatcatagttttatttatgaacttcataagcatggtgcacaaaatgtgtatgctttacctctagcagcatggacaaaaacattactgcctaattctaccaattcaacaattcattctttaaacccattagtatttattggtaatgcttcctt

SEQ ID NO: 3123 - DNA, 200 bp, Lawsonia intracellularis
ccctaacaaaaagaaatttttttctgggttacaactaccaagctcaataatatctcaagcaaaacttcaactaaataacaatgatcctccccatgtccattggtgggttaaaaagcttgctattaaacaatactggcctgataaaaagatacgtttagctggacttggtgctgaggagtgttcactactcaaacgtcaac

SEQ ID NO: 3124 - DNA, 200 bp, Lawsonia intracellularis
tatggctaactattgctgcagaaaaaggacttacgctttttggtaatcctgagtggaaatatcttcttccccctaaaaccgatgtcaggagtcctattgattactataaaacagtccctcatgtatataatcaggcaaagtatactcttaatgttacaagcctccttcttcctaaaggacttactcaacgacattttgac

SEQ ID NO: 3125 - DNA, 200 bp, Lawsonia intracellularis
gtatggatgtttgatggatttcttatcacagacgcaacaccaggattatcccttttcccaaaagaattaaccgaatttattgccatacaatcagcaaaagatcttcatagttgtattgaaagatttgaaaaagatacgactctccgattacatcttatgcatgcttggaaaaagcatttaatagattttcacttatattc

SEQ ID NO: 3126 - DNA, 200 bp, Lawsonia intracellularis
aaataggttacaaaatattttatctttattacagattaacatataaaaggagcatagatgtataaagaaaaaatagttgatgtagctattaatgtctttgcaaaaccataccaaacttcactttctatactttctttactacgacattctggatctattattgataaaatctattttcaatttgaaccatatgggtcaaa

SEQ ID NO: 3127 - DNA, 200 bp, Lawsonia intracellularis
atatgacttatatcaaccatatattatagctgattatcttaaagaccaagctatttgctttcagccacagcaatggatagctcttagttctgtagacaaaaaccaacttcataatattaattacaggcactcaatacgctatcaatatgcttgggaacatacaaacaaaaaatatctttttattatccataatgatgtct

SEQ ID NO: 3128 - DNA, 200 bp, Lawsonia intracellularis
ttttttttaaagatattcttacaccacttatacaaaatataggctcacattttgccattggccaacttggacaatgttggaattgtcctgcatctcatatacaaattgtgcaggaaagcatacctaagctttctgcatgtcaccaagagagataccaactttttcgccccacatttatagaacttaaaaaactttatact

SEQ ID NO: 3129 - DNA, 200 bp, Lawsonia intracellularis
gtagctaaacaaaagaatatttttgttcgaccctacttagagaattcggagtctatttttcaaatacaaccatggacacttcctgaatgtcgaattaatgaatgggcatgtcttgtaaatatggatatttgtgctccattgacaattcccattggtactgtattaccttttggagctttttaccaatgtggacctatctg

SEQ ID NO: 3130 - DNA, 200 bp, Lawsonia intracellularis
tcttgatacttcagttgcttggtttaaaggtatgcatgaacataaccttacagcaaaacatatggatgtaagcaaatatatgcaacattggataggtactggaaaaatgacgcgtattaaatatgtaaaagctgaaaaaaatgcttcttatttactaaaaaaatacttccctcattttgtagattggtgcagaacaaaaa

SEQ ID NO: 3131 - DNA, 200 bp, Lawsonia intracellularis
atgtaatcttttaacattaaaaaagtgcaaaaaatgtaataatatctttttataactactaggataatctcttaatgacaaatatttctccatattttattaatttatttagtttgactttattaatcttaactaataaatagtattaactacaaataaatagataatagttatataatagaattagtaagaacttaaca

SEQ ID NO: 3132 - DNA, 200 bp, Lawsonia intracellularis
cagctcttgtttataatgagggagtatcagcacgttaactaactattgtataaactctaactaaaacccaaataataacttcatatatgttaacggagaaaaatgctatgtcaaagcagtttgaaatatataaatgtgaaaagtgtggaaatatcgttgaattgctttttgcctcaagtggtactctttcctgttgtggt

SEQ ID NO: 3133 - DNA, 200 bp, Lawsonia intracellularis
caacctatgactcttatgaatgatagtaatacatctggagctaaagaaaaacatgtacctattattgaaaataatggttcaggttgcaaggtaactgtaagtacagtaatccatccaatggaagaaaaacactggatcgaatggattgaaattgttacaatcgatggacaccattgtaaaaaattccttaatcctggaga

SEQ ID NO: 3134 - DNA, 200 bp, Lawsonia intracellularis
tgaaccaatagcatactttaactatccattagagcaaattgcttatgccagagaatactgtaatcttcatggattatgggaagtaagcgttaattagttagtaagtattgactactttaacatcctactataacggagttcttgatgacaaagtatgaatgtgatgtatgtggctgggtatatgatcctgaagagggaga

SEQ ID NO: 3135 - DNA, 200 bp, Lawsonia intracellularis
tccagagcatggaattgctccaggaacagcatttgaagatattcctgatgactgggtttgtcctgtttgtggcgcaggcaaagctgacttttctcctatagactaaaattaaagaatccatgggaatgtatcattcccatggattcttaataatatttttactaatgtaacctattaatgttacagtaaaatttactata

SEQ ID NO: 3136 - DNA, 200 bp, Lawsonia intracellularis
taagtcctatatcttaatatatacagatatgttgggcatctattcttaaataaaggaagagcataaaatgaaacctgttgaaataactaacgatatttactggataggtgctgtcgactttaataaaagaaattttcatggatatagccggtcacctcaaggtacaacatataactcataccttatctgtgatgaaaaaa

SEQ ID NO: 3137 - DNA, 200 bp, Lawsonia intracellularis
atgttatttttgatacagtagatgaagaatattcaggagtaatgttttgtagacttgctaaacggctccctgtagataaagttgattatattgttattaaccatacagaaaaagatcatgcaggagctttaagtgagcttgttacccactgcaaaccagaaaaaatttttacatcaaatataggtaaaaaattcttagat

SEQ ID NO: 3138 - DNA, 200 bp, Lawsonia intracellularis
gcccaatttgacacaagagagtggcctattgaaattgtatcaacaggagactctatctctattggaaaaagaacaatacagtttctagatactcgcatgctccattggccagatagtatggtatcttatatccccgaagaaaaacttcttataagtaatgatatttttggccaaaacttagcaacatctgaacgctttgc

SEQ ID NO: 3139 - DNA, 200 bp, Lawsonia intracellularis
agatcagtgtgatccatcaagtgttaaaaagcgtactaaagaatatttctataacatcatcctccctttttctacacaagttagaaaaacattagataattttaaagaaatacaacttgatatacaaatcatagctccagatcatggtgtcatttatagaacagctgaagactgtgatagagttcttaatctctatagag

SEQ ID NO: 3140 - DNA, 200 bp, Lawsonia intracellularis
aaatggcagaacaaaaattaaaacaacgtgctgttattgtctttgaaacaatgtggggatcaacaaaaaaaatggcttatgctataggctcaggttttgatgaagaaaatgtcccctactctattattgatatacaaaaaaatcaccatagtgatgttatgactgctttagctgatgccagtggtattatcataggctca

SEQ ID NO: 3141 - DNA, 200 bp, Lawsonia intracellularis
gctacacataataactcctaccttccaggaattgcagatctacttcactatatgcaaggacttcgtcctaaaaatcttattggaggtggctttggctcttatggctggtctggtgaagcagcaaaagatattcaagcaatattaagttcaattggtgtagaaacaccatctgaacctctaagagggacattcatacctaa

SEQ ID NO: 3142 - DNA, 200 bp, Lawsonia intracellularis
acatcaactactaagagattgttttaattttggaaaaactattgcacaggcactaaaaaataaaggacaatattaaataaaaaaagtcagtgattatctttttataagatgaatttaactactttaaacttcataaaaaattagttattatttaatttgtagtttttagtgctaaacgcatttttacctttaactaaaga

SEQ ID NO: 3143 - DNA, 200 bp, Lawsonia intracellularis
taaaaggggaattgcatggatgttgttatgctgtcacggctccagtttgctgtagctgttttttttcactttatctttgttcctcttacacttggactaacggtcattcttgctttaatggaaacaaagtatgtgaagactggtgaagaagtgtataaaaaaatggctaaattctggggaaaactattcttaataaattt

SEQ ID NO: 3144 - DNA, 200 bp, Lawsonia intracellularis
tacgttaggagtagttacaggtattacccttgaatttcaatttggtacaaactggtctaagtattctgaatatgtaggtgatgtttttggttctttattagccattgaagccacagcagctttcttccttgaatcaatatttattgctgtatgggcctttggttgggataaaattgggaagaaaatgcatcttacggcaa

SEQ ID NO: 3145 - DNA, 200 bp, Lawsonia intracellularis
tatggttagtagcctttgcctctaatatgtctgctctttggattatccttgctaatggttggatgcaacatcctgtaggatatgtattaagaaatggccgtgctgagttagatgattttatggctgttttcttaaatccatatggttggggacaattttttcatactatttttgcttcatggatgttatcagggttcttt

SEQ ID NO: 3146 - DNA, 200 bp, Lawsonia intracellularis
gttctaggaatctctgcttggcatctctatcgtaaaaatcaaatggatttcttcaagcgttcagttaacatagctgctccatttacattaatatttgctattattgttgcattattaggacatcagcaaggtcaatctgttgctcatcatcaaccagcaaaacttgctgctatggaatgtcactgggaaacaggaagtga

SEQ ID NO: 3147 - DNA, 200 bp, Lawsonia intracellularis
tgtacctatgtatcttcttgtttggccagatgttgaagaaaaacgcaatattatccaagcacttcctattcctggattattaagttttcttgcagacaatacaacaagtgctgaagttgtaggcctaaatagctttccagatgacgaccttcctcctattttacctaccttcctttcatttcgatttatggtagctactg

SEQ ID NO: 3148 - DNA, 200 bp, Lawsonia intracellularis
gtctactattcattctttttgcatggctagcttggtggtatagagataggcttgaatatcaccctaagctactaaaatgtcttatctatcttattccactaccatacttatcaattatggctggctgggcagtagctgaaataggaagacaaccttggattgtttatggacttatgagaacaaaggatgctgtttcccct

SEQ ID NO: 3149 - DNA, 200 bp, Lawsonia intracellularis
attccagaatcttcagtctggatttcccttataagtttcattgtagtttactcatttcttggcattttagatatttatctcctagccaaatacggacgtaaaggtccccaggcataaacctttatactagggagaatcaggagaattatatgcttgaaacaatatggtttgttctttggggactgctttgggcagtatac

SEQ ID NO: 3150 - DNA, 200 bp, Lawsonia intracellularis
tttgtacttgatggatttgatctaggaatgggttcactcatgccatttctagcaaaaacagatactgaaaaacgtataatttataatgcagctggaccctattgggatggaaatgaagtttggcttattactgcaggaggagctacttttgcagctttccctaaagcgtatgctgtcatgtttagtgcattatatgctcc

SEQ ID NO: 3151 - DNA, 200 bp, Lawsonia intracellularis
tcttcttattatactctttgccttaattttccgggcagttgcatttgagttcagaaataaaatagatactcccttctggcgtagtttatgggatttatttctatttttaggaaattttattcctgctctactactaggagtagcatttgctaatttatttatgggaattcctattgatagatatggtgtatattatggca

SEQ ID NO: 3152 - DNA, 200 bp, Lawsonia intracellularis
atctactaatgctgttaaatccatatggtatcttaggtggtattttctttgttatcatgttctgtgtacatggagcactatggcttgcactaaagtctgaaggcctacttcatgccaaagctgttgtaacagctaaaggattgtggtttattcttgcagcattaactatagcctttcttgtcatgacttattactatact

SEQ ID NO: 3153 - DNA, 200 bp, Lawsonia intracellularis
aacctttatgacaattatgaaattacaccagcgcttcttgcatttcctgttatagctgctctttcacttatctttatccagcttatgcttaataaagaaaagctcttgcttgcatggatttgtagtgcgttattcatcttatgtgtaacattctttggtgtactaggaatgtatccaagtttaatcatctctagtataaa

SEQ ID NO: 3154 - DNA, 200 bp, Lawsonia intracellularis
tccaacatatagtgtaacaatcatgaatggggcatctagtcctttaacacttaaaattatgttaggtgttgtcattggttgtatacctattgttattgcctaccaggcatgggtttactatacttttgctcataaagtaacatctgaatctatccatgctgatgatcatgcttattaaaagattatataactagaaaaaa

SEQ ID NO: 3155 - DNA, 200 bp, Lawsonia intracellularis
aggctgtttatatacaaacagcctttttttctaatcaataaaagtattgcatatgaagaatactctaatagatacttctatcatacagtaatccattagaaaaaattttactatatggtatgcaatcagctattatatatatatataatttattcttcagtatcagaagtcggctcagttgctgatgttttaacacttaa

SEQ ID NO: 3156 - DNA, 200 bp, Lawsonia intracellularis
ttgtgtatgtacagcagaggatttatcaagttgaagttcagtagcaaggccttcaagtccttttctccccataagagctgcaccatatttttcattaggttcccatgcaaacataacagctgtaccataacacgaaaaatatcttgtaccatcaggatgaaacgcaacgttttcactatagcctacaattgcatgtgctc

SEQ ID NO: 3157 - DNA, 200 bp, Lawsonia intracellularis
ctttagataaagctcgagatgccataccaaaaaaagcatcatcagcatcatatgctcttgaacaaactaatcctaaaacttttgaaattcttttaccttcaactgtatcagtggtaacaacaggaaattttccacctaaaaaaagttctttagacttttctaaaataggatcttttttcaccttggatttcttttttctc

SEQ ID NO: 3158 - DNA, 200 bp, Lawsonia intracellularis
tttgctctgttagcattaaaaaaaaacatacttcactcctttattataaggaacgttcatccaagctaatcaaaaactatgcctaactaataaacaatgtaatatcctattgttaaaaaacaaaaacaatattctcaaaaaaataatgcaaaaaaatgactattttcttttttatcatacctgaaaaataactattcaat

SEQ ID NO: 3159 - DNA, 200 bp, Lawsonia intracellularis
cgaataaaattatgctaacttcatctaagagttatgaatagtacttttatatgaagtaaaagaaagtttttttactataactacattaattaattaccattaataaaactatagtaaataaatattgtaagctaatataattatagtgcatatctataatagtgtattaacaaaattatatgttatatttataacaaggt

SEQ ID NO: 3160 - DNA, 200 bp, Lawsonia intracellularis
ataatccataaattgttagagatgttaaggagtatctcagatggctgctaagatgaaaaccatggatggtaatgctgcaacaacacatattgcttatgcattaagtgaagtggcatgtgtttttccaattaccccatcatctgtaatgggagaaactactgacaactggtcagcagctaataaaaaaaatcttatgggac

SEQ ID NO: 3161 - DNA, 200 bp, Lawsonia intracellularis
aaagagttcttgtacaagaactccaatctgaggcaggagctgctggtgctgttcatggctcactggtagcaggagcactaacttgtacatttacttcatctcagggtttactccttatgatacctaatatgtacaaaatagctggagaacttcttcctgctgtcttccatgttgctgctcgtgctattgccgcacatgca

SEQ ID NO: 3162 - DNA, 200 bp, Lawsonia intracellularis
ctttccatctttggtgatcagcaggatgttatggctgtacgccaaacaggcttctcactcctttgttcaagttctgtacaagagtgtatggatctggctttagtagcacacttatctgctattgagtcacgtgttccattttgccatttttttgacggatttagaacatctcatgaagtccaaaaaattaatgttattga

SEQ ID NO: 3163 - DNA, 200 bp, Lawsonia intracellularis
atatgaagagatccaaaaaattgtaaattgggaaaaaatacacatattccgtaaaaacgcaatgaatcctgaacatccatatcaacgtggaacagcccaaaaccctgacatctactttcaaaatagggaacgttctaaccccttttataatgctgttcctgggattgttattgattctatgcaaaaagtattttccatca

SEQ ID NO: 3164 - DNA, 200 bp, Lawsonia intracellularis
caggaagacagtaccaactctttgattatgttggtcatccagaagctgacagaatcatcattgctatgggatctgcctgtgaagctattacagaagtaattaatactctaaataaccaaggacaacgattaggacttattaaagttcgtctttatagaccattttcagtagaacatctacttcgtgctattccaccaacg

SEQ ID NO: 3165 - DNA, 200 bp, Lawsonia intracellularis
gttgagtcaataacggtccttgatcgaaccaaagaacctggagctcttggtgaccccctatatttagacgtttgtactgcgttcatggaaacaagagatgtaaaacatcctcatattatttctggtagatatggtttaggctcaaaagacttcactccagctatgattaaagctgtttatgataatatgttacccaacaa

SEQ ID NO: 3166 - DNA, 200 bp, Lawsonia intracellularis
tcgtaaaaatcattttgttgttggaattaaagatgatgtcactcatacaagtcttgatatcagtgataactttgatactgtcccaccaggaactatccagtgtaaattttttggttttggttcagatggaacagttggagctaataaacaagctgtaaaaattattggtgacaatacagataaatatgttcaagcatact

SEQ ID NO: 3167 - DNA, 200 bp, Lawsonia intracellularis
ttgcctatgattctaaaaagtcaggtggatttactgcatcccaccttcgatttggggatcaccctattcgttcaacctatcttgttacccaagctgactatattgcttgtcatcatcctgcctatgtcatacaatatgatgtacttgaaggtatcaaagaaggtggtatttttgttttaaactctagttggaacaccata

SEQ ID NO: 3168 - DNA, 200 bp, Lawsonia intracellularis
gaagatttagaacgcgaacttcctccaccaatgaaacgaactattgctcgaaaaaaacttagattttataatattgatgctgttaaaatcgcttctgaagttggtttgggtggtcgtattaatatgatcatgcaaactgcatttttcaaacttgctaatattattccatttgaaaaagcaatagaacttctcaaacaatc

SEQ ID NO: 3169 - DNA, 200 bp, Lawsonia intracellularis
tattcaagagacatataaaagtaagggagaagatgttgtaaaaataaactatacagctgttgataatactgtttctgccctgaatgaaattcaagttccttctacttgggctgatgcatcaactgaatttgttatacctagatataagaatgtaccagaatatattaaaacctttgttgaacctattcttactgaaaaag

SEQ ID NO: 3170 - DNA, 200 bp, Lawsonia intracellularis
gggatatgcttcctgtttcaagctttaccccagacggaatagtaccacttggaacagcagcctatgaaaaacgtgctattgcaattgatatcccagagtggattgctgataattgtattcagtgttttcaatgttcttatgtatgtcctcatgcttgcattcgtcctgttctagccacagaagaagagttaattggggct

SEQ ID NO: 3171 - DNA, 200 bp, Lawsonia intracellularis
cctgaaacctttgttacaaaagatgctattggtaaggagcttaaaggactcaaaatgcgtattcaagtctatcctgaagattgtgttggatgcggctcttgtgctgatgtatgcccatcaaaaccaaaatcacttattatgatgccattagaaacacaacgacaggaacaagttattaatcttgattttgcccaaaaaca

SEQ ID NO: 3172 - DNA, 200 bp, Lawsonia intracellularis
tatttctcttaaagataatctgatgccaagagatacactaaaaggctctcaactccaacaaccacttcttgaattttctggtgcatgtgctggttgtggagaaacaccatatgtgaaattgttaacacaaatgtttggtgaacgtatgttcattgctaatgccacaggttgttcaacaatatggggtgggtctgctccta

SEQ ID NO: 3173 - DNA, 200 bp, Lawsonia intracellularis
ctgctccatactgtactaacaaagatggacatggaccaacatggggtaattctttatttgaagatggagccgagtatggacttggaatatctttagctattcaacaacgtcgtgctaagcttgcagagcttataaaagaagcattaacaattgaaggtatttctacagaactcactaatgctttgaatggatggttagaa

SEQ ID NO: 3174 - DNA, 200 bp, Lawsonia intracellularis
catcaagaagatgtagatctttctaaaaaatttgggcaagatattaccacaattctttcaaatacacctacaaatcctatttttgcacaaatcttagaaagagaagatttatttactaaaaaatctttttggataattggtggcgatggttgggcatatgatattggctttggaggccttgatcatgttattgcatctgg

SEQ ID NO: 3175 - DNA, 200 bp, Lawsonia intracellularis
taatgacataaatatcttagtccttgatacagaagtatattccaatactggtggacaatcttcaaaatcaacaccccttagtgctgttgcaaaatttgcagcttctgggaaaagaactaccaaaaaagatcttggtcgtatggctatgacgtatggctatgtttatgtagcatctgtttctatgggggcaaataaacaac

SEQ ID NO: 3176 - DNA, 200 bp, Lawsonia intracellularis
aattacttaaagcttttaaagaggctgaagcatataaaggtccctctattattattgcttatgcaccttgtattgaacaaggcattcgtaaaggtatgggtaaatctatggaagaatcaaaacttgctgtagactgtggatattggcctttatatagatttaatccagaattagcaaaacaaggaaaacaaccacttatt

SEQ ID NO: 3177 - DNA, 200 bp, Lawsonia intracellularis
ttagattcaaaagctccagatggtaatttacgtacattccttgctggagaaaatcggtatgcacaacttgaaaaaaatgatccagaaacagcaaacaaacttcatgaagaacttaataaagaatataatgatcgctatcgcctattaaaacaattgtcagaacttacagttacagcatcagaagacccattgttacaaag

SEQ ID NO: 3178 - DNA, 200 bp, Lawsonia intracellularis
ataactagaaatacaattagaacgtcctatttacatactttctaaatgtattcatactacttttatcttatgtaaataaaggtgataggttatggctaataagctctatattactgctacagaaaaacgtagtggtaaatctgcagtaacccttggcatgatgcagctactcatgcgacacataagaagtgtagcatttt

SEQ ID NO: 3179 - DNA, 200 bp, Lawsonia intracellularis
tccgtccaattattgctaatatagatcctaataaaaaagatcatgatattaaccttatccttacaacgtttaatatcgccatgccttatgaggatacttatgcatgttcttttaaagaggctagaacacttatagcagaacaaaaatctcctgttctaattgaaaaaattatacaaaaatacaaacatttagaagataat

SEQ ID NO: 3180 - DNA, 200 bp, Lawsonia intracellularis
tatgactttattctttgtgaaggtactgattatcttagtaatgattccgcatttgaatttgaacttaatatagatattgctgctaaccttaatatgccacttgctgttattgttaatggaaaaaacaaatctattgaagaccttatttcttctactgttacaagctcagagcttatttttgataaaggacaagatattgc

SEQ ID NO: 3181 - DNA, 200 bp, Lawsonia intracellularis
ttgcctttttattaataaaacaacattagccatacctgaactagagaattgcaaaaaggctattagtactgcaataggctcacaggtccctattgctatgttccctaataattctgtcttaagtcgaccaacagtatctgatataaaacgttggatgaaagcagaagtaatatatggtgaagaatgcctaaataattcag

SEQ ID NO: 3182 - DNA, 200 bp, Lawsonia intracellularis
tcgaagattatattataacaacaatgcaacccaataattttttggaccagttacaacaaggtcttcttattataacatctgcagatagatctgatattgtccttgctagcttagcttcaagactttcaatgacatatcctgatatagctggtattattctcacagggaagtttgaactttcctcacatattactcgtctt

SEQ ID NO: 3183 - DNA, 200 bp, Lawsonia intracellularis
atcaatggatggcaatctgttcctgtccctattttaaccgtatcccaaaatagctatcaagctattatgacactctcagaactttacggaaaaattaatgtttcagatacacgaaagatacatatagcactcgctatttttgaacaacatgcagacagtaatgctattacgcaacgtgttattgaaagaacttctgacaa

SEQ ID NO: 3184 - DNA, 200 bp, Lawsonia intracellularis
agtgtctcctaaaatgttcgaatttaaactcattgaacaagcacgtcgccataaaatgcgtattgtccttcctgaaggaacagaagatcgtatcctcaaagcagctgaagtactttcacaaagagaagttgcagacataactcttttaggagatatccctacaattcataaaaaaatttcagatcttggactgtctctgc

SEQ ID NO: 3185 - DNA, 200 bp, Lawsonia intracellularis
ataatgttcagttaattcaaccaaatcaaaaccatgctctatttgaaaattatgtacagacatattatgaattacgtaagcacaaaggaataactttagatgatgcccgtgattggatgaatgataccacttactttggtactatgatggtttataaaaatgatgttgatggtatggtttcaggagctactaatacaaca

SEQ ID NO: 3186 - DNA, 200 bp, Lawsonia intracellularis
gctcatactgttcgtcctgcgtttgaaattatcaagactaaacctggtgcatctattgtttcaagtgtctttcttatgtgtatgaaagaccgtatccttgtttttggagactgtgctgtaaatcccaatcctactgcagaacaacttgcagacatagctattagttctgcacaaacagcacacgtctttggtattcctgt

SEQ ID NO: 3187 - DNA, 200 bp, Lawsonia intracellularis
cagagtagcaatgctctcttattcaactggaacatctggtaaaggtatagatgtagatattgtttctgaagctacaaaaatagcacatgaaaaagcacctcatcttatattagatggtcctattcagtatgatgctgccattgatcctgatgttgctaagacaaaagcaccaactagtgtggttgctggtaaggcaacag

SEQ ID NO: 3188 - DNA, 200 bp, Lawsonia intracellularis
tattcattttccctgatttaaatacaggaaataatacatataaagccgtacaacgagctgctggagcaattgctattggaccaattctccaaggtctaaaaaaacctgtaaatgatctttctcgtgggtgcactgttacagatattattaatacagttacaattacagctattcaggcacaagcagaacaagggttaata

SEQ ID NO: 3189 - DNA, 200 bp, Lawsonia intracellularis
acaatagactaaattaactaatatatatatataagaatacactataataaagtatagctttagtagtatggttctcttctctttattcttaatgaaaggaaatttcaatatatgaaagttcttgttattaatacaggaagctcctcgttcaagtatcaacttattgatatgcctatggaacaagtgcttgtttcaggttt

SEQ ID NO: 3190 - DNA, 200 bp, Lawsonia intracellularis
agtagaacgtattggagaagaagtaggacaaatggttcataagatataccctaatacttctcaggaaaaaaagtatactacaacccagcctttttctactcatgttgaaggaatgcaggctgtagttgctgaacttatcaatccaaaacatggaattctccattcagtaaaagaaatatatgctattggacatcgtgtag

SEQ ID NO: 3191 - DNA, 200 bp, Lawsonia intracellularis
tgatgggtggagagacaatgaaacaccctgctcttattaatcaacatgtaaaaaatattattcgtgaatgtgccatcttttcacctctccacaacctttctcatcttgcaggaattgaaactgctgaagaactttttccaggtattcctaatgttgctgtttttgattcagaatttcatcaaacaatgccaaaagtagct

SEQ ID NO: 3192 - DNA, 200 bp, Lawsonia intracellularis
tatctttaccccctgccatatgatatttatgacgactacaaaatacgtcggtatggtttccatggcacatctcatagatatgttgcacaacaaacagcaaattttcttaacagacctataaaagagctaaactttataacttgtcatttaggtaatggatgttctatgacagcaatcaaaaatggaaaaagtattgatac

SEQ ID NO: 3193 - DNA, 200 bp, Lawsonia intracellularis
cagtatgggattaactcctcttgacggactaatgatgggtacacgttgtggggatattgatccagctattgttccattccttatagaaaaaacagaaaaatcagcaaaagacgttgatgaattaatgaataaacaatcaggtctcaaaggcatttgtggaatgaacgacatgagagatatacatgaagcttgtgcacaag

SEQ ID NO: 3194 - DNA, 200 bp, Lawsonia intracellularis
gtaatgcaaaagcacaacttgcacttgatatgtttatctatcgaataaaaaaataccttggagcttattatgccatcctagggcatcttgatggtatcatttttactgcaggtattggtgagaatgatactattgtacgtgaaaaggtttgtagtggattagaaaatttaggaatttttcttgatagctcacgaaataat

SEQ ID NO: 3195 - DNA, 200 bp, Lawsonia intracellularis
acacatagttccacgctacgattaattagtacagataatagtccaatacctatctttgttgttcctaccaatgaagaattagaaatagcaaaattaacaatacaactggttagtaatacacaataacttttgcaataccttatgcttatcttaacttaaccagttttcaacacatttctgtatatcttcaagctgatcag

SEQ ID NO: 3196 - DNA, 200 bp, Lawsonia intracellularis
gacaaaaccagataatacgcttatctgcattaaaccatgttagttgtcgctttgcataactacgtgtattttttaaccaacgctctttagcttcattaaatgtatattcaccttttatagcacctaaaagttccatataccctatacctgaccagttttgaacatctttattaaagtaacgcttataagtagttataacc

SEQ ID NO: 3197 - DNA, 200 bp, Lawsonia intracellularis
tcttttattgctccttgaacgaacattttatctatacgtttttctagcaatggtgctaattcaattaatggaattttaatacctattctaagaacagttgcaggatatgcttcagttacctgctgatgccaccatgtaaaagtttttccagtttcataaaagacagtgagagcacgaagaactctttgtcgatcatttgg

SEQ ID NO: 3198 - DNA, 200 bp, Lawsonia intracellularis
gtgaatagaattagcatacaaaggatcatgcactttaagcatattgtataaaaaactaattcctttttcttcagcctgtttttccatagttaagctaagttcagtagaaattggtggtatagtaacaatcccatcaaacaaagcacgtaagtataaccctgttccaccgactaataatggtattttggtatgacatactg

SEQ ID NO: 3199 - DNA, 200 bp, Lawsonia intracellularis
aatcaagttgctctgcagctaatgttgcccatcttcctgcagagattttctcatgtaagtctaaacaagcataaagtttatgaggaattaaagaacgttcttcaaaagttggttgagctgtaatgataggaacacctttgtatagttgtcttgaatcagcattaataatgattccatcatatcttttagctaaatgaaag

SEQ ID NO: 3200 - DNA, 200 bp, Lawsonia intracellularis
gctatttctgatttacctacacctgtaggaccaacaatacaaataactttacgatagttcatgatatacgaatatcattagtcacataactacacatataactactagttaggttattactaaatttgacttggattgacagtattttgttttcaaacatattaacacattttctggaacaaaatctgttacatcaccac

SEQ ID NO: 3201 - DNA, 200 bp, Lawsonia intracellularis
caaggcttgcaactgtcttaactacagttgaactaatataaagccatttgtagtctgaaataaggaatattgtttctatctctggacaaagtttacggttcatcaatgatgtttgaaattcatattcaaaatcagacacagctcttaagccacgtaaaatagttttagcattttttttttcaacataatctacaagtaga

SEQ ID NO: 3202 - DNA, 200 bp, Lawsonia intracellularis
ccagaaaaattttctacatctaccatatgatcagaaaaaaaagttgtattaatcatagatactcgttcttcaatagaaaacaaaggctttttgcctgagtcttgtgctactgctataataatcttatcaaataaatgtttagctctatgaataatacttatatgaccattagtaagtggatcaaatgtcccagggtaaat

SEQ ID NO: 3203 - DNA, 200 bp, Lawsonia intracellularis
agctaaacgtatttttgtgtcttccatataagtaaccttgtttgaccgtaggatctatttgataatagctcaagctgtggatgtaactgaaaaaaattaatacgtaatgtggtttctacttctgcaataatataaccctctggagcaatccatcctttttccacaacacaacttatagttgtttctagcctattcccacc

SEQ ID NO: 3204 - DNA, 200 bp, Lawsonia intracellularis
ataaggtggatcaataaatacaagctgatatagcttaaatagtgagtcttgatttagaaattggattacatcctgttcaacgacacttacttgctcaaatagtctgagtttctctatgtttttatataagcattgcactgccttaggattattttctataaaacatacttctgcagcaccacgactaatagcctcaaagc

SEQ ID NO: 3205 - DNA, 200 bp, Lawsonia intracellularis
ccaaacttccactacctgcaaacagatcaagaatatatgtttgatcccaaacaatacctcttgatgtaagcatagaaaataatgcttctcgaactttacctgttgctggtctataaccatctccttcaattgtcttcaatatccttcctctaagagaacccgtcataattcgcatatctatctcacatttactatataat

SEQ ID NO: 3206 - DNA, 200 bp, Lawsonia intracellularis
attaaaactatagtaacctactatagctttaggattaacttggaatacatgttacttattatcctaacttttatgaatgtaataatgagtgtaataataataataattttattaactacttgttataatttaaaaaagactctatttcctgattaagctcgactagccgatcgtacatacaaatttgtgtttcccatggc

SEQ ID NO: 3207 - DNA, 200 bp, Lawsonia intracellularis
ttttgagcaatattcttaagctttaaattaatattattaaaattattttttatagtatcagtaagcttactccattcaactggttgtatgtttttagattcactaacaataactttttggctttctgctgtaagctctaactgttctaaataactaggaatgtacacagttagcccatacttttgttgtataagctttga

SEQ ID NO: 3208 - DNA, 200 bp, Lawsonia intracellularis
aaatacttcttgagccttttcttccccatgtacaaggagaacttccatttgtggttgatacattctcccaatccaatcaagtaattgttgttgtcctgcatgtgctgaaaatccaccaagtgtataaactttggcttttatagctacatcttcaccaaaaatacgaacagtttttgctccatctacaatttttcttccca

SEQ ID NO: 3209 - DNA, 200 bp, Lawsonia intracellularis
aggttccaacagcttggtaaccaacaaaaactatacttacacctgttttccaagcattattaaataaatgatgtttaatacgccctgcattacacattccacttgcagaaattataatagcagatccttttaactcatttatttctttagattctttaacacttggtgtatattttacagagagaccatctaatatggtt

SEQ ID NO: 3210 - DNA, 200 bp, Lawsonia intracellularis
ttaaatgatggatgatcattaaattttagatagctattatatgtttcaaatatttttgttgtttgaattgctaatggactatctaaaaaaataggaatatcaggaatacgattctgttgttttaataaataaagacaatataaaatttcctgtgttctacctacagcaaatgcaggaataatagttttactattatgtgt

SEQ ID NO: 3211 - DNA, 200 bp, Lawsonia intracellularis
ccaactataatgaatagcatcaactaactcatcaaaagttgcttgatcaattttatgattacgatctccatatgtactctcaataaagagaaaatcagcctgtggaggggtcataggttcatgcattaataaactatctgtccgaccaagatcacccgaaaaaactaaacgtacttctttaccttcttctttaatgacaa

SEQ ID NO: 3212 - DNA, 200 bp, Lawsonia intracellularis
gctcaagaaatgctgcacctaaaatatgtcctgcatcatgatatgttacttgaatacctggatgtggttcaaacatggtattgtatgatacaggagtaaataatggagaaacattttgtgcttcctcaactgtataaagtggtaatacctctttttctatcttaccatgtcgtgcatactttttattcttccattgtgct

SEQ ID NO: 3213 - DNA, 200 bp, Lawsonia intracellularis
tccatttcattaatatgtgcactatcttcaagcatcaaagtagcaagatctttggttggagctgtacagtagatccgtccatgaaaaccttcttttacaattttaggtaaaaggcctgaatgatcaatatgtgcatgtgttaataaaataaattgtaattcttttgcatggtagtgttgtatttcaaaattacgtttttc

SEQ ID NO: 3214 - DNA, 200 bp, Lawsonia intracellularis
aataattgaatttccttgaaacattccacaatcaacagtaaacattatcccacatgcttcaataagatagcatgaaccagtaactgtttttgctgcacccaaaaatgtaattttcataaaatcttacctaacctaatctctaaaataaaatataaattagaatacaaaataagattcattagagcaatacatacaaagat

SEQ ID NO: 3215 - DNA, 200 bp, Lawsonia intracellularis
tacttctctaataagtaatcatgaatagcaataataaaactgttagttcaaaatagaaattccttctaatctactaaataaggtttcatctttatttagattacaaagctcattgcctaagtctaaagaagaaataataacacgtccaaggatgtaacgtcctttatgtccgttatctattgtatgaactccccataaat

SEQ ID NO: 3216 - DNA, 200 bp, Lawsonia intracellularis
catgtagcattacaggcgtgtcattatacattccaagatataagccaacatgtccctgaaaccctatcaatgttacaaatggaatagcctgagttttcatcacagaataaaatttctcttttgaaacatgttctaagttgataaaatgtctttcatgtacttgttgttgtgaattccttggaagccaaactccaaaaggg

SEQ ID NO: 3217 - DNA, 200 bp, Lawsonia intracellularis
ataaaaagatctgagatcatttccgagcaatctctacgaccaaaaagacctccccacccatatggttgtccaattaaagactctccaatagatgctagtaacttaggtgttagtacttgtggcataggtaaaacattatgttttggagtctctgcagtgataatatgtgcattaccatattgatcacgaacaggaactaa

SEQ ID NO: 3218 - DNA, 200 bp, Lawsonia intracellularis
caacatagcagtatcaccagttagcttaaccataggtagtacagttcctaaaaaacctgcacctccatgcacacctgaagcatcttttaataatactccatcataaataattgaagcttgtggtaacgataaaaattgttttatgatatcagaattcactttagcaacaacgttatctctcacccacccagaaacaaaag

SEQ ID NO: 3219 - DNA, 200 bp, Lawsonia intracellularis
gtgtttctataaaaacccaagcttcatcttcagatatatgtgttacaactactggtgtaccaagatgaatatttgcttccataagataatcaaaaggaaaaccttctcctgctaaagaaggatttctgaaaaaagggcttactgttggtgcagcacgaacagctgttctttctgttataatacccttatagttgcatgaa

SEQ ID NO: 3220 - DNA, 200 bp, Lawsonia intracellularis
ggatacgttgaacgtgcagcatttttttccactgctttccaatttttttctgtccatggaagaaggttttcagcccaccatgtagcatgcgattttgtattaggataagaaaaaataatatatgcatcatgaactggaaaaattggttctgtagaatcccatggttgaaaaaaacgttttttaaaaaaattatatttttc

SEQ ID NO: 3221 - DNA, 200 bp, Lawsonia intracellularis
ctccaattttttccctgaaataagtgttacttctcccaacaagtcagaatagactttcaaactttgagggaataccattaaatctttaagcatacctggttgatacgaagaaacacattgttctgtaggcttagataaaacatatccattggataaaaaagtaaaagacattatgctacacaaaaatattactataatac

SEQ ID NO: 3222 - DNA, 200 bp, Lawsonia intracellularis
gaaaaatcattataatatatcctggttagtaattatataaagataacatatctagtatgtagtgaataaaaaactctaatacaaaatttatgttactataatacaataaaactattaattcaaaacagaaatccctgttcttttatcaaaaagaagcgagtctgttatacaaagttcagctcctggctttaatgatgtta

SEQ ID NO: 3223 - DNA, 200 bp, Lawsonia intracellularis
taacaatacgtccaagaatatgacgtccttcagatccgctttggatagtacgaataccccaaacatcatgcaacatagcaggtgtgttattatacatacctagatataaaccaatatggcctttaaaccctattaatgtagcaaaaggtatagctttatctttcataagctgatacacttcatcttctaaaagttgtgtt

SEQ ID NO: 3224 - DNA, 200 bp, Lawsonia intracellularis
gtatctatatagttccaagcatgaatttgagcttgtgaatttcttggaagccaaataccaaaaggaataaaaagatctttcataagttcagagcaatctctatgaccaaagctaccaccccatccatatagttgtcctaacaatggattcccaatatctgctataaaagatgctgttaattcatgaggtataattgttgt

SEQ ID NO: 3225 - DNA, 200 bp, Lawsonia intracellularis
gtgtatttttgaaacatatacttctgtaatacgagctctacgatgttgatcccttagtggtgctaacagaactaattctgtaggtgttgattttattataggtaaaacagtacctaaatatcctgttgttacatgacgtcctgaacgtccatttagtgctacattatcatgaataattgctgcttgaggtaaagaagaaa

SEQ ID NO: 3226 - DNA, 200 bp, Lawsonia intracellularis
accacttgcttatattatcagaaattaatgcaacagtatgctcaggaacccatccagatacaagatctgtttctataaaaacccaatccccattagtagacgtatgtgttatgaaaactggtgtaccagcatgaagatttgactctataagataattaaaaggaaaaccttcacctgcagtttgtggatttagaaaaaat

SEQ ID NO: 3227 - DNA, 200 bp, Lawsonia intracellularis
gagctttgtgttggtgcagcatacacagatgttctttggataagaatacctttatccttacgagaaggatatgttgaaattgcagcattttttttcacttcatcccagtgaatatctgtccaaggaagaagattttcagcccaccacctaatgttttcttttgtattaggacgatcaaaaatactataaacagtagaagc

SEQ ID NO: 3228 - DNA, 200 bp, Lawsonia intracellularis
aggtactgaggctttatccttactccatggttggaagaaatgttttttaaacaaagcatattcatctaacattctatcttttgttatgagtggatcttggggtaaaacagatgagtacacttgtaagtcttgaggaaatacttctaagtcttttattgtgcctaattgtggagaaacacaattaaatgtcttacaacctg

SEQ ID NO: 3229 - DNA, 200 bp, Lawsonia intracellularis
tgagacaaagaaataaacttatcatacaaaaggctatgtaatttttatatctcatgagtcccccttaattatagtttttgtaacattccatttaccagtcttgctgaaagccaagtatgtcttttttgagttttattattttttatagctatagctaatgcctttgactcaccaacaaatacaacaagatttttcccacg

SEQ ID NO: 3230 - DNA, 200 bp, Lawsonia intracellularis
tgtaacacctgtataaactagatttctctgaagaaggacataatgttgtgtcataagaggaataacaactgcaggatattcagaaccctgagatttatgaattgaaatagcataagctgcaacaagttcatcaagttcatcactaggataagaaacaagtcgttcatcaaaattaaccacaatacttttttcttccatat

SEQ ID NO: 3231 - DNA, 200 bp, Lawsonia intracellularis
caatatatgtaattctgcctatatctccattaaacacatctttttcataattatttctgatttgcataactttatcaccaaggcgatatatcttttctcctctctgtaaaaactgagatgtgggattaagttcttcttgtaatcttttatttaaacttgcagcacctactgttcctttatgcataggagttaatacttga

SEQ ID NO: 3232 - DNA, 200 bp, Lawsonia intracellularis
atatcattaataggatcaaacttaaatcttcttggtatatgattttttacaagatctacaatgagatcagctgctttatctggatcagattgacgtataaaatagaagtctgaaagagcctcttttgatgattcaaggcaaggaacttctcctttattcattagatgtgcattacatacaatctgactttctgctgcttg

SEQ ID NO: 3233 - DNA, 200 bp, Lawsonia intracellularis
tcgaaaaacttctgtaagttctacaacaggaagcagctgagatataataagatccttaagtacattacctggaccaacagaaggaagttgatagatatcaccaacaaaaataacagtagcacctaatggaatagcctttaataaatggtaagtaagcataatgtccatcatagaagcctcatcgactactaataaaccac

SEQ ID NO: 3234 - DNA, 200 bp, Lawsonia intracellularis
aggctaatggcatatcttcatttctaataaagccatcatttctagggctatactctaacaaacgatgaattgttcttgcttccattccaatagcttctgacatacgttttgctgctcgtccagttggtgctgcaagtaatattttagctttattctctttaaatacttggataattgcattaagtacagttgtctttcct

SEQ ID NO: 3235 - DNA, 200 bp, Lawsonia intracellularis
gtaccaggacctcctgtaaggatcataatctttgatgtagtagacgttactatagcactcatctgttctggagctagagtgatattaagtttattgataacctgtgaaatggtatcatctgtatttttaaattgtactgattttggtgaatgtagaattcgctgtaaataaaacgcaatttgagattcgtaatggtgata

SEQ ID NO: 3236 - DNA, 200 bp, Lawsonia intracellularis
gcgatttaaataaattccaatatgttcatccaatgcttcacaaacaattctttcttctctcttaagatgttctatagcatcctctatgcactgatgatcaataccaagattatgactagtaagctctataaaagcttcttttggataataaacatgtccttcatccatacactttaaaagagtatataatattcctgctt

SEQ ID NO: 3237 - DNA, 200 bp, Lawsonia intracellularis
gggctcgcaaaggattatctttttcaaatcctaattttgtggctagtgcatctgctgtaagaaaccctattccatgaatatccattgctaatctataaggattttcttttactatatttaaagactgctgaccataatacttatatatctttactgcataagtaacactaataccgtaaggttgaagaaacaccattagt

SEQ ID NO: 3238 - DNA, 200 bp, Lawsonia intracellularis
tctcgagttgtctgatgttcttgccaacactcagtaatttgatctaattttttctttgtaataccctttattttaagaagttcttcaggagaggtatctaatatatgaaatgtttcttctccaaactctgtaacaatactctcagctgtttttttacctatacctttaatcaaacctgaagaaagatatcgcttaatgcc

SEQ ID NO: 3239 - DNA, 200 bp, Lawsonia intracellularis
ttctactgaagcaggaagacgaatttcaaatgttgacatctgaaattgtctcccaaaacgtgtattattcacccattgtccagaaacaagtattgaagcgcctggttgaggattatttaaatacccaacaacaggtactgtatcaatatcatctgagttctctggtttaaggcggaataccgtatatccattttctgaat

SEQ ID NO: 3240 - DNA, 200 bp, Lawsonia intracellularis
tatgaaaaacaattcgatcaagtataccttgcagtactatctgctcttttatatctaattgtgccatatgattaattagtctagtaagttagctataagaactataaatacagtataaactaatataaaaaaagatataaaatttcttttactacttctttatattgacaccatcttcatgattagtatagataacccaa

SEQ ID NO: 3241 - DNA, 200 bp, Lawsonia intracellularis
gttatcgaaaattctttgttgaaagaagtgatatctagaacgggcggttagctcagttggtagagcgtcggccttacaagccggatgccacaggttcaagtcctgtaccgcccaccacattcctttacttttcaataatacgtattatattatatctattcttttatccctcttatttcaataagtctaactattatttt

SEQ ID NO: 3242 - DNA, 200 bp, Lawsonia intracellularis
agaaaagcttaaattatataacatatactacaaaatctgtattaacctactataagatctaaataaaaaaattattttattataccacaaaaatttataactttttacatctgctattttattttttcctacatacacttatttacattagactagatatagtctaattctaatatagagctacatttaaatttaattat

SEQ ID NO: 3243 - DNA, 200 bp, Lawsonia intracellularis
tttatcaatagctaacagttgtaatactacttataagtcacaactatttttaatacgttaacttattttatatatagaatattttataaacgtcatttatcttgaatataaggtacattaattaattaattatataaaaatattattaaataatgaaaaaaatatatacatctattcatatcctttatatattaatcgta

SEQ ID NO: 3244 - DNA, 200 bp, Lawsonia intracellularis
actagttatatattaattatattatattattttataacacataaaaatgtatatgctaatacaacaaataatttatatagtataatcagtttatcctctcctactaatagctataaagaacactataataatgtgaacaatcaaaaatacaaaaaaaatatacaaaaaaatatagagtatcacagctcagctgaaaaaac

SEQ ID NO: 3245 - DNA, 200 bp, Lawsonia intracellularis
tcagaagatatcagctaaatctactttgccctaccctcaaaaaatagcagatcctcctatacattcttttctacaaatgacttctgttgctattccacttatagtaggaggattatttcttaataactctagagcagagaaaaatatccataatttaagaaatgattatgtacctaagtttaactttcattatgaagatt

SEQ ID NO: 3246 - DNA, 200 bp, Lawsonia intracellularis
atctccagtttgctccaggtgcagctatgttaggattaaaattaggtggtctagaaggaagaagttcatgggcaaggatgctttttgctgatgctatttctattggtttaatgttacctactgtagaaataataaaagtacatacaaaaaagaaacggcctactggttcttcgcaccaatcttttccttctggtcataca

SEQ ID NO: 3247 - DNA, 200 bp, Lawsonia intracellularis
gcaaatgcatttatgttagcaacaatgctacataaagaatatggggaaacacataaccgatggtatagcattttaggttatacagcagctacagctacagctattggaagacaactcaacaatagacattggcttagtgatactatggtaggtgcaggtataggtatcatgtcaacagagataggctatcttctaacaga

SEQ ID NO: 3248 - DNA, 200 bp, Lawsonia intracellularis
tcttatttttgaagataaaggtattatccgacctattagagaaccaaaaactatagataaaaatagaaaaccttcatttttaggtctatatgcaggtattaatcaaatgtcaggcaaaacaaaaatagacagtgtagaaatatctacaggaactggtgctaatgttggtatagaaggagctttattttttaacccctata

SEQ ID NO: 3249 - DNA, 200 bp, Lawsonia intracellularis
taggagttgggggaaagttttctgcagcaaaccttcccatattaaaagatggaaaactccaaaaagaaagatacatagatatactttctgggtatgggggactatatttctcttaccctctcacaaggagaattggcttaggaagtaaagttcttgcaggatataattattaccgtcaatccaaatcattaccatcttct

SEQ ID NO: 3250 - DNA, 200 bp, Lawsonia intracellularis
tcaatcaaaataggaggaaaaaaagggttaggtatttgtactggagcttcaatacatattcttgctaatgacagcttaagcgtatcatgtttccttgactataattttatacaatcacctcttccaaaagacaaaaagttgagagctacacaaaccttaggtctttcaacaaatattgctttttaatatattatagtttg

SEQ ID NO: 3251 - DNA, 200 bp, Lawsonia intracellularis
gctaataattaactctaatataataaagatgtctatctttcttatagaaaaagtaaaaagaatgataaaaattattaattatcctcttggtaacaatataaaattaactatgtttgataaatgtcccagactctagttctataaatgcttcctgtaactcatcatttgtattcataacaataggaccaccccatgcaatt

SEQ ID NO: 3252 - DNA, 200 bp, Lawsonia intracellularis
ggttcctgtataggtttaccagaaactaatataactcttgcaccatctaaccctgtttgaataaataaatcttttcctggattaaataaaatagcacgcttagctggtataagagcagactcaaagccacactcaccctctacaatatatgcaaatactgtatgttgaggatcagttgcaacttgccaaactttatctgg

SEQ ID NO: 3253 - DNA, 200 bp, Lawsonia intracellularis
ttttaaagtaagatcaaaaaaattaatattaacatattctcccttggttgcgccaggaacatctttgtatttacctgttacaacagcaactgtaccagcatcttcttctaccttagggatcatctctctagtaatatctctatatttaggagctaccattttatatatacgtggtaagttaatccataactgtaacccta

SEQ ID NO: 3254 - DNA, 200 bp, Lawsonia intracellularis
aaaacctttctgtagccttaggcatctcctgatgtaaaataccactgccagcagtcatccactgacaacagccatcaagtatactcccttgattacctaaactatctttatgctcaacattaccttgaatgagatatgtaaatgtttctatccctctatgaggatgcataggaaaaccttttatataatcttcaggattt

SEQ ID NO: 3255 - DNA, 200 bp, Lawsonia intracellularis
cgtgagtcaaaggcatctaacataagaaatggatcaaaattcttaactgttaatgatccaagaacacatacaagatgaacaccagctccatcaactgacttataccctgtaactatttctttaatagtacgatgtgacacctcaaccttcctttttatatatcttacaattctttaacagtatattaattaatgtacctt

SEQ ID NO: 3256 - DNA, 200 bp, Lawsonia intracellularis
agtaagagataagaagaaatgattatacactataaatgactatattataatatataaaaatttaattaaaaatttttatattagttattatgttacatgtaacataataactaatatagtaattattaatgtaaaaattattgttatatattactaaattcagaagatgtataactatatctatcacataataaaaggaa

SEQ ID NO: 3257 - DNA, 200 bp, Lawsonia intracellularis
ggtagctacagtagttgctagtactatccaataaataaatctatagtctggtgttggtgttacaataaaataacctaagtaataacacacagcagagcttgaaagcatttttacctcaataccaagtaggtcatttcttttcaaaacatataaaaatagtattcctgctagaggaatccagaaaataggtagaaaaagaa

SEQ ID NO: 3258 - DNA, 200 bp, Lawsonia intracellularis
tgggcaatatattttttgttgtattaacatatgaataaagtatatctgatgcccttcctttttcaaaagtaaatccataattatttttatgcatcacaaaatatgacacacatctaggtgtctttatagggaatcgactaaaattattaaaaagtcttaattttgcttgaagatatgcccatggctcattcctcataaca

SEQ ID NO: 3259 - DNA, 200 bp, Lawsonia intracellularis
gaataccaattttcttttaataaattatcagttagttgaactattgaataaaatttccatcctttatctaaatggacgataggaagctcttccacaggaaattcatgtacagtactttctttaaaaaaaagatttttccctactattcttgaagtagcagcaatctcatctattttcatatgcattgtagggcattctga

SEQ ID NO: 3260 - DNA, 200 bp, Lawsonia intracellularis
ttttgcatctaacatatatttatttataccccttcctatacaaaacaaacagatcaaaataatacaactaacaccaaaaatatatatctttttccaattaggaaaaccaatcgttacaaggtaatacactattggagcagaagccataatagcattatcccttacccaaaaagcatatagaaaaaaacatagtgctaaaa

SEQ ID NO: 3261 - DNA, 200 bp, Lawsonia intracellularis
aaaatagtaaataactgtaataagattgtcgttggatatgtattcctaaatgaaacaaagcaaaggcaaagaaaaaagcatatgccattcctatatctttccataggactcctgagagcccagcaataaaaggtaataaaggtaatataagccaaatccaacttattctattctttttactatacattaaacataataaa

SEQ ID NO: 3262 - DNA, 200 bp, Lawsonia intracellularis
gccgttgctccaaaaaacataaaagtatggaatagcaacataggaataggccccttatacacaagaataaaacatgaccaaacccatgccataatggggggatgccaatcttcatatgtatgagttactgcctgctcatattgagatacactatcaatactcattgcacctggccaataagctcctaccaaaaaagccat

SEQ ID NO: 3263 - DNA, 200 bp, Lawsonia intracellularis
ttcacataacagtaatactataaacaatattcttttaatatttaatgactgctccataaaaaataaaaaagagcctaacctatttttatccatcctattttccttacaaaactataaatattttctgtttatagtttgctgaaataataacactattcatacattgtttacttatagaaaaaatatgaagatggtattga

SEQ ID NO: 3264 - DNA, 200 bp, Lawsonia intracellularis
agactgctctgttcatttattactattgttatattctaatgaatacaaattacatactatcatgagactagttattgttgttgatataatagatcaatagatatctaaaactaggtgttattactcctttattaaactgaaatctataactattttcccacattcctaaataataactcatcttcttttttaaaggaaaa

SEQ ID NO: 3265 - DNA, 200 bp, Lawsonia intracellularis
ctactaaaaattttttaaagatttcactttgctttcagatatgcccatggttaattttttataactcaatactaattttttcagatcttcattagttaacatcacttttctataaaaattgatcccttttacctaaggtaactcaggtagatctttaacagataaactatgtattggactttctataacaaaaagatttc

SEQ ID NO: 3266 - DNA, 200 bp, Lawsonia intracellularis
tttaaacaatataagattttacttctgtttcatctgtttttataattgaagtaggatttatttgttctgcacctaatataaagttattaatatattttcctataaaaaaacatagtagtattatacaacttattataaaaaaaaacttttttataataagggttaaaaattcttatagaatgatacactgtaggtgcagc

SEQ ID NO: 3267 - DNA, 200 bp, Lawsonia intracellularis
agccataatgacattatcccttatttaaaaagcatatagaaagatggaataggactaaaaatagccatatccatcttattctactttttatataactcctataaagtaaaatattgctccaagaaacatactaaaatgaaataagagcattaatgagatgtataatataaaaaatggcaaagactaaattcataccataa

SEQ ID NO: 3268 - DNA, 200 bp, Lawsonia intracellularis
tgggaggatactagtatacatatctatgcgacaatgcctgatgatattgttcaaagctatcccacattatggcacctggccaataagctaagagtagtagtccaactccacctaaaaaactatgtatttaaacaaggggctcaaaccataagaaaatatcatatccttactaatttgtttcatgatattctttttctata

SEQ ID NO: 3269 - DNA, 200 bp, Lawsonia intracellularis
ttaatattccataatactgacttatctatagaaggatccattaaacacttcactgcttgcatagcagcaagcatagaatgatccatattattataccgatgcatgccatttcgaccaatgggatacatatttgctatactatccaaaaatttttgtacttcagctattctaaagtaggtaccaaagtaagcaggatatgc

SEQ ID NO: 3270 - DNA, 200 bp, Lawsonia intracellularis
ttttttcactcgtagtattgtaacgtcttctacatctaagcatgtaataaatccaagagaaataagttcttgaatggccatctgtttaaacgcatcatcactcatactccacaaatgagctccttcattagcaaagtattcaagtcctaaccataccttttgaggatcagaaactaaataaggactccaattattaaata

SEQ ID NO: 3271 - DNA, 200 bp, Lawsonia intracellularis
tttggacacgtccaataacaacatctgattcttgtatataaatccaattatcctttataggtactgaatgattactttcacgatcattatcatctcttaatcttaaattttttactaacagaccaactgtaataaaatctctatatacaagaccattacttacttcttgtactgatgatggtgcatttttacacatttca

SEQ ID NO: 3272 - DNA, 200 bp, Lawsonia intracellularis
acaagttcttttaaaggaattgaagaaataactgcactacagtctactctagattgttcaccattattacagttttctatatatacagctgttacttgagaatcctctatatctaagccaactactttatgatttaataaaagtgtagcacctagtgcagtagcttctttagctacagtttcccataaatgaccaggacc

SEQ ID NO: 3273 - DNA, 200 bp, Lawsonia intracellularis
aaacttaggatataaaaattgctctattaagcttgtatctgtatttttttgctcaattgttttatcagattgaaaaattttacggatagcatgacgtaataccctagctatagaaataccttttatacgctgtgcaccccactctggcgaaatatctgaacaaggtaccccccatactttttgagtataatcacgaaaaa

SEQ ID NO: 3274 - DNA, 200 bp, Lawsonia intracellularis
atgttttatataactctcttccaaagcggttaataaaaaagtcttctaaatttttttctgactttataggaaaaaaacaaactcttatatatccaattcccattttaactacacgtagtatacctaatttttttattgtcgaatattttagagaaataggatagtcaaaaaatttacggagataaaatattcttgataac

SEQ ID NO: 3275 - DNA, 200 bp, Lawsonia intracellularis
cgtctacgaatcaacatgactctatcttctttttcaggatctggaccatgaataacgtcttcatctctgttatattcctggctacttgaagggaagtccttcttatcacttttcccttgcaacggcaggatatccaaccaccatttcatgacttgagcagactttgaaaaaaacctatgccctcctatatccattctatt

SEQ ID NO: 3276 - DNA, 200 bp, Lawsonia intracellularis
tcctttataaacaatggtacgcgcaagtcctcctacctgactttctaattcaacaataattactttatgttttcctgagcgaagtaattctaacgctgctgtaagacctgctggaccagcaccaaggattataacaggatcactcttcataataatattctcattataataagtaggatagctaaagtaaaaaaatgact

SEQ ID NO: 3277 - DNA, 200 bp, Lawsonia intracellularis
ttaattgtcagaagtcaaatattcaagaaatataaatacaataatgtataatagcctattatctatattcgtgatatataaaatgttatctagataatgttagctatttttgatattcatacttgcctagacagcacagttaatattcatatctatttttaaatttattgataaatataaaaagtacctctgcctagttt

SEQ ID NO: 3278 - DNA, 200 bp, Lawsonia intracellularis
tagctatatgtattactccaagttgatacaactaaccttcaaaacatccattaaaattagtgaattacaaaatcaaagcagttagataaaaaaatatttaacttaagataataaaacaattttcgatcttttttcccaaattaggacttataatctattggagttcaataatgaacaattttattacttatagccaacct

SEQ ID NO: 3279 - DNA, 200 bp, Lawsonia intracellularis
actctcccagctggatttgtagatgtacaaaaagtaatacaaagcatattagttgatctaaaatatgtaggaagcgataattttgtaggaagacccattccagggtataatacaaatcgggtcatattatcaaaagaagctactgttgctcttgcaaatgtacaaactgaattgcaacaatttggtcttagtttattaat

SEQ ID NO: 3280 - DNA, 200 bp, Lawsonia intracellularis
ttatgatgcttatcgaccaacacaagctgttgacgcatttattaactggtcaaatgaaccagaagataaaaaaataaaacaaaagtattatccaatacttacaaaaaaagaaatatttgatcagcaatatattatgaaaaaatcttctcactcacgtggcagtactgtagatttaactattgtttcatttaataatacaa

SEQ ID NO: 3281 - DNA, 200 bp, Lawsonia intracellularis
caaatcaaaataacatgttttatactcctcttgatatgggtggtatttttgattttttcggtaaagagtcacatcctgacttccaaaatattaccccccaacaaaaagcaaataggctatttttacgtacaattatgacaaaatacggcttcactccaatttctaatgaatggtggcatttcaccttagctaatgaacct

SEQ ID NO: 3282 - DNA, 200 bp, Lawsonia intracellularis
ttcccagaaacatatttcaatttccctatagaataaaaattctataattaatgtgaatgatagtattgcattataatgatcagtaattaattattactaattctctactataaatacttatttttctttttttgagaactaacttcttataaaaaaagcaaatttatccttagtaagataaaataattactcaaaactca

SEQ ID NO: 3283 - DNA, 200 bp, Lawsonia intracellularis
aaaaaatctggttgagttgtttaaacaactcacgtagaattctatttcttaactatgttattggtatagagtaaaattaaaaaataaataggcttataagttagttgtaactttttatcttatttggaaaaagagcaaaatccccttcaaatacattttatatctagtaactaaatcgggatgtaatgtaaaaataatac

SEQ ID NO: 3284 - DNA, 200 bp, Lawsonia intracellularis
taataatgttaactaatcaaaaaaatagtaatataataagtaaaaaagttggctaagttaaaatgcattatatgcaattaataataaaactaaaacttcctctctctagtacgctagaggcaggtgttatggctgaggtagctgctcttcatatcatatgcagttagtttatacctacacctattaattaaagaaggctg

SEQ ID NO: 3285 - DNA, 200 bp, Lawsonia intracellularis
ttatcttatgattaatgtaacagaaaatgctagaaaagagcttgaaacttactttacaaataaagaaaaaagtcctcttcggatatatcttgcttcaggtggctgaagcggaccacgattagcattggctctggatgagccaaatcaacaaactgatacaatacttgaagagggcgatttaacgttttgtattgataacg

SEQ ID NO: 3286 - DNA, 200 bp, Lawsonia intracellularis
aactactttcttctgtgaaatctgtaaccgttgatatgaattatatgggatttaatattgaaccagaaattcctctcaatgtagaaaatggcggaggtggttgtggtagttgctcttcaggtggatgtggttaacttataataacaagctaggattacacttaaactatgtaattcctagcttgctatatgtttaagata

SEQ ID NO: 3287 - DNA, 200 bp, Lawsonia intracellularis
ctctctaggtccttcaacataaaaatcttttccttctgtatcccctaccacaataactggaaaatcttttacttccatagctgctaatgcttctggtcctaactctggataagcaataacagtgtactttataatatgttgtgaaattaaagcaccagctccagcaatagctgcaaaatatactgctccataagttttta

SEQ ID NO: 3288 - DNA, 200 bp, Lawsonia intracellularis
actcatttaaaacttttgcagaccgtttacctttaccaatcatacctgtaagaccttgctgtaacattgctggtgtataactatccatccttccacctgttgttggaccagctgaaccaataatatgccctggtttagctggagatggaccaacatagtacaaaatttggttttcaagtgaaacaggaagtttttctcct

SEQ ID NO: 3289 - DNA, 200 bp, Lawsonia intracellularis
ttttgtagcgtttctatcatacgcttatgtgcagcatctcttgcagtatatatagttcctgaaatcaaaacatgctcacctatatgtaaagaacgtgtaacttctttaattaatggagtagttatagtccgatattctgccattcataactccttaacagcaagtttattataaccagacctctgtatgacgagctgaat

SEQ ID NO: 3290 - DNA, 200 bp, Lawsonia intracellularis
gacaattaaggtttacagctacaggcaatgaggcaatatgtgtggcaaaaaattcaatatttactttacaggctgtcattcttccaccaaaaccaagtggaccaagccccatcttattaatctcttgtaataattcatcttcaagagctgcatattgtggatttttattatgagtgtcaatatcacgtaatgcagctttt

SEQ ID NO: 3291 - DNA, 200 bp, Lawsonia intracellularis
ttagcacagattgctgctatctccagatctccaccaatcccaatacctactactagtggtggacaagcacttgctcctccctccattactgtttcaagtacaaaccgctttacaccatctataccgtcagcagggattagcatttttagtttacttttattttcagcaccagcaccttttactccaaaccttatcattaa

SEQ ID NO: 3292 - DNA, 200 bp, Lawsonia intracellularis
tgtatcgccaggaacaagacgagtatgtataatagctggtgtattatctcctgtatttttacgttcaaataatgggtcagctacaacagattttcgtaaatatccagaaatatacccttttctaacacctttgttaatagcttcttcaaaatctcctccagtaataacaacgtcttgaccaatctctgtaaaaataacag

SEQ ID NO: 3293 - DNA, 200 bp, Lawsonia intracellularis
caagcccagtatcttgacaaagaggcatcatttctctttctgcaagttctgcattattaacaagatgttgtagtatacaactttctagtggtgatgactcattatgaataccatttttaaactctgtcaaaactgggtgaggtaatttacaacaagcatctattgctaattgagcaacagtatcttctattactgataca

SEQ ID NO: 3294 - DNA, 200 bp, Lawsonia intracellularis
tgaatttccttcatgtgaacttattcctatatacttataatttattgtagtaaaaaagaaaaataaaataaatagaatcagaccatttataatggctactaatgttctaataactaatttcagtatttctgaaatatcatctatggattataataaatacaaatttggtaaagggtcaatggaattagataaaaaattta

SEQ ID NO: 3295 - DNA, 200 bp, Lawsonia intracellularis
gtttataatcctgtaaaatagtattaattttttatagataataagtctattatcattactccttctgagatccagttcttaaagctgcaatagttccagcatactacttttatccattctctgttctccttgtctagctggtatagaggtttcaggtcctccagctatcatatcttcttgtaatggaaaaacatcttcca

SEQ ID NO: 3296 - DNA, 200 bp, Lawsonia intracellularis
tcattatttgtcccatatgagctccagtaggtgtactttgtgcatatgaaacatcctgttgataatgaccttgtccattacccattacgttcatttgttgatactgaggggcaggctgcatattcctattattattattattattattaagtgccattgcctgtggcacattctgctgattattcatagataaattgttt

SEQ ID NO: 3297 - DNA, 200 bp, Lawsonia intracellularis
ggaggcattgttggagagggtatattttgatttactacaggctgtggagcattccttttaggactactctgtggctgttgcatagaaaaagtgtcttcaactggataaggcctatttgaagaaaaatagatagcatttgcagcagactcaattttactaagttgttcatagaattctttatattttctattcaatgttct

SEQ ID NO: 3298 - DNA, 200 bp, Lawsonia intracellularis
tactattctatcttgactaaaaactatataaaaaaacataagaaacataccaaaaaaacataaagctactgcaattaataacataggactactcctacttagagtaaaaaactagctttattcaggttgataatatactttgtatatttataatctacatatactatcaactttaaatcagatcagaacatatgatagtc

SEQ ID NO: 3299 - DNA, 200 bp, Lawsonia intracellularis
tttttttatataagttcaaggattctatcttgagatattattacatagaagtgacatactttaaaaaaaatttttatatttatagtaatctagtatagataaaagatatataatctatatattatatcacttaaatattactttaataaatatatactacaatgaataaattatcatacattttaattgtgagctatctc

SEQ ID NO: 3300 - DNA, 200 bp, Lawsonia intracellularis
aatatagatatataataaaataccatcattattcctatcagctatagtttataacataaagattaattacaaagaatttcattagttttttgaaaaaagagtaatgaaataatataactagatactagtatgttatgataacttgctcgtcaccaacattttgtttctcaatagaaccaataatccatgcactaacttcc

SEQ ID NO: 3301 - DNA, 200 bp, Lawsonia intracellularis
atagactttaagatattcatagctcgagtaacagaatcattgggtattatgagtacatatccaattccacaattaaaaacttgtaacatttctgaccaagataaagaaccttgttcctgcaaccaataaaaaataggaggtatatcccaactactaaattgaatatttgctacaactgattgtggtaatactcttggaat

SEQ ID NO: 3302 - DNA, 200 bp, Lawsonia intracellularis
attatcataaaaaccaccaccagttatatgaaccatacctttaatagaaatatctttaataaggttacaaataatatcagaataaataaatgttggttttaatagtacttgtttgaaagtatcccgagagccaggtataatattgtcaggctcaatagcacactgattaataatttgtcgaacaagagagtatccattag

SEQ ID NO: 3303 - DNA, 200 bp, Lawsonia intracellularis
agtgaataccagatgatgctaatccaataatggtatctccaaccttaatagatgagccatcaattatcttggactggtctacaatacctacacaaaatcctgctaaatcatattcaccttctgtatacataccaggaagttctgctgtttctccaccaagtaaagcacatcttgcctgtttacatccctcgctaatacca

SEQ ID NO: 3304 - DNA, 200 bp, Lawsonia intracellularis
taaataacttgagtggctttatccacatcaagcttagacgtagcaaaatagtcaagaaaaaataaaggacgtgcaccttgcactaaaatatcatttacacacattgcaacaagatcaataccaactgtgtcatgcttattaaagtcaaaagcaaattttaactttgttcctacaccatcagtagaagatactaatactgg

SEQ ID NO: 3305 - DNA, 200 bp, Lawsonia intracellularis
attatcaacctgagtaagattaagcttaaaaagtccaccaaaaccaccaagatcagaaagtacaccttggatatttgtttctgaaacaaacgatttaatatttgagatcaaggcattacctgcattgatattaaccccagcattagtatatgcttgtgaacgaattaaagacattcttatctcctagttattcatagtag

SEQ ID NO: 3306 - DNA, 200 bp, Lawsonia intracellularis
cagtatgtattattataaaatatacaacagtaaggtgtatctcatgaataaaaaaaaatccctatacctattattcataggatattgctaccaatttcaaataaaacgattactgttgttaatgactattataatagcaaatactatatttggatttaaatatattatttgtatatcacatgcctatacaataacaacac

SEQ ID NO: 3307 - DNA, 200 bp, Lawsonia intracellularis
caaataatccgagtatctttataggaacagatattaaaggtgataaaattattcaagttgtaactccaatatcagatatggaacaacaacctaccccaccacttattataatacctaaagtttctgtcccttgggaaccaactgttccaatagttaaaccacttgatacaattacaccagcaacaccaaaagtccaatca

SEQ ID NO: 3308 - DNA, 200 bp, Lawsonia intracellularis
attaatcccatgaaaaaatgaatagtacttaggactcaaataatgactaaaaatccttttatcactagaaaaaaaaagatacattatgtaaataaaaaaaatttacaatcttgtaatgataaacaaaagaatctaactaaccaagatgaacttactgatagctacaactttttccctgtacaagaagaaccatcttcaga

SEQ ID NO: 3309 - DNA, 200 bp, Lawsonia intracellularis
tgaagaactttttttacaacatataggacaaacacagaaaatacataacaaaaaatatgtattaccttatcataaggaaaaaatatctaaaaatataactataaataaaaattctaggaataaattaacgttagatacaaaaatagataaaacaaataaccaaaaaacaataagtagtaataaaagcactattcagactt

SEQ ID NO: 3310 - DNA, 200 bp, Lawsonia intracellularis
cacaaagcaatattcttttaccaaatgataacctaactgaaaataatacttttcttacagcagttaaagatgttgttcctctttcaggaaaatcacgtattactacctattgtagaccaacaaagtggactcaaacagatataacttctctaaccacaaataaaaaacctattaaatttaatatcgtaaaaaaagaagaa

SEQ ID NO: 3311 - DNA, 200 bp, Lawsonia intracellularis
cagttagaaggacatatagaaggctttgataaaaaattgtttacacaacttcaaagtggactttttcgtccaaaaacaacattagacttacatggttttaacatacaacaagctttttatacagtagtaaaatttttacacacagcctatataactggtcaacaacctgctctaattatatctggacgtggaaaaaattc

SEQ ID NO: 3312 - DNA, 200 bp, Lawsonia intracellularis
acctcaaggtatacctgtgttaaaagaaaaactttatgaatgggttacacaagagcctctaaaaagagttattcttgcattttgtactgcacatgctcgtgatggtggtactggagccatctatattcttctaagacagtacaaaaaaacatggaatattcactgggaacaacgtccactagatccagacctattataaa

SEQ ID NO: 3313 - DNA, 200 bp, Lawsonia intracellularis
atcaaatagtctactttactaatctaaagaactagttaacctcagatactagcttaactagcttgtttagcaatatttaaagactttgttaaatgagaaactttacgtgcagcttttttccaatgaataacaccttttttagctgctttatctatagtagatgtagcagttattaaaagttgctctgctttttcatgctc

SEQ ID NO: 3314 - DNA, 200 bp, Lawsonia intracellularis
attacttgtaatagcagtatgaacagattttattacattttttatacgagtctttactgcacgattacgtaatgtacgctttatactctgtctatgtctcttaatagcagacttatgattagccacaatttcctccaatataaattataaatataggttataaaattggtcttttaactactaactttaaaaacttctgt

SEQ ID NO: 3315 - DNA, 200 bp, Lawsonia intracellularis
caatatatgaattaattcattatatctgtaaaactgaaaaatctgcaaggctttcaatatacaaaagtaatgctttaagaaggtttaatctatttcttcttacttctatgtcattagacattatcattacttgatcaaaaaatgtattaatagctggttgtaattttagtaacatcataaaaacaggtaaactagctgtt

SEQ ID NO: 3316 - DNA, 200 bp, Lawsonia intracellularis
tgactttcttgattaaacttatttactgctatcattagtttctctgccaatactttttcagcagtatccttaaataaagagggattccaatgtccagttaatacaatttccgtttctttatcttgctttttaatgatattaataacacgtttaattgtctgaactaattgggaaaagtcttcatgttggctcaataaaat

SEQ ID NO: 3317 - DNA, 200 bp, Lawsonia intracellularis
aaagctatctaatctatcttttatagaccataattgacttgtctgtgtacttactatagcctctactaccaatgtatcataccctaatgccaaaaaataattttttaaccgtgctataataaattcatgtaacttttgtaatacatcctcaggagctaatttccaagatacatttacaaagttatcttgagctcttgtat

SEQ ID NO: 3318 - DNA, 200 bp, Lawsonia intracellularis
aaagctgatgtaaattgattggatattctttttcaatcaaaatacgaataattcctaatgcgcatcgacgtaatccataaggatcagctgttcctgttggaattataccacatccaaagcagcctacaagtgtatcaattttatcggctatagaaagaatagcaccaagatctgttacaggaacgtcagtatcaggccca

SEQ ID NO: 3319 - DNA, 200 bp, Lawsonia intracellularis
gaaggtaagtattgttcagcaatggctgttgcaatggactcagactctcctttgtgtcgagcatatattcctcccatcacaccttgcaattctgggaactcttcaaccattttagaaacaaggtctactttagaaagtgaaccagcttttctagcttcttcagcattactagttggtatatacttagcaatccactcaca

SEQ ID NO: 3320 - DNA, 200 bp, Lawsonia intracellularis
tagtagactaactcgatgttctttctgagcaatactaccaagtggatcaaggaaaataagatgagtaagtttttcttgccattcatcaaatgaactattgatatcttcattccaaaaaaatcgggcatcttcaagtcttgcttgtaaaactctctcccaaccttgcttcactaatgcaagatcaggaggagtcatattta

SEQ ID NO: 3321 - DNA, 200 bp, Lawsonia intracellularis
acactgtaagaaaataaggtaataaattaccctggctatctaagataccaaagcttttttgatgggtttctatacttgttaaaagcacttctctaggtaagttaagaaagacagaattaatagttcctaacaaagggtaaggatgttctactaatcctatgacttcattcaacaacctttcattccaattgacaacccct

SEQ ID NO: 3322 - DNA, 200 bp, Lawsonia intracellularis
cctatgagctgtgcttccttatttcctaattgaagaatactatcttttcgactattaggatcaagtattacattcccaacttcttttaataacatgtaataatctgtagaggaaggcacttcaataaatggaacattattatttcttagtccaacagtatttctatttgaatgaatcccagctaactcaaaaggtacaat

SEQ ID NO: 3323 - DNA, 200 bp, Lawsonia intracellularis
atctgaatctaataaagccataatccaacgtattggacggataaaagtaaagggattatttccccatcgcatacgttttggaagaggtaaagcagtaataatttcaggacataacctagctaaaacttcttttgtagggataccaccttttactttcaatcctgaaatatattctcccctatctgttgatatctgtgaaa

SEQ ID NO: 3324 - DNA, 200 bp, Lawsonia intracellularis
gtgaacctatggttatacctaaattttttgcaaatccttcagcagccttagttggattgccatctttatcaaaagctatatttataggtggacctataacaacctcttcacaatgaggctgaatcatatcaagccctttaatacatacaacaagtctacgtggtgtggaataatcagatacttctgtaggtcgataaccc

SEQ ID NO: 3325 - DNA, 200 bp, Lawsonia intracellularis
attgattgaagagaatctaaaaaacgaactccaagctctgattgaagttctagaagaaaacgagcaggaagttcttcagtaccaatttcaagaataaaagtagccatactatctaaatctctccactacccttgagcagcataggataacccattttttctcgttgtaatgcatagagttttgcaatactagaggcaagt

SEQ ID NO: 3326 - DNA, 200 bp, Lawsonia intracellularis
gctcggactttacttatataacttgctcgttctgttgtggaaattgcaccacgtgcatctaacaaattaaatgtgtgtgaacacttaagacaataatcgtatgctggccaaacaaaacctttcttaataagctgtctacattcattatcaaaatctttgaaaagtttaagtaacatagaaacatcactttcatcaaaatt

SEQ ID NO: 3327 - DNA, 200 bp, Lawsonia intracellularis
atacgatgactgctctacttcattttgatgatacatttgaccatatgtaacatattcattccactgtaaatcatagactgaatctttttcttgaagatacatagccaatctttctaatccatatgtcaactctacactaataggttctaggtctatccctccaacctgttgaaaatatgtaaactgtgtaacctccatac

SEQ ID NO: 3328 - DNA, 200 bp, Lawsonia intracellularis
catcaagccatatttcccaacctaatccccatgctccaagtgtaggagattcccagtcatcctcaacaaaacgtatatcatgaagtgtagagtcaattccaaggatttgaagacttcctaagtattgttcaataatatcatctggggatggctttaatactacttgaaactgaaagtaactttgtaaacgattagggttt

SEQ ID NO: 3329 - DNA, 200 bp, Lawsonia intracellularis
tctccataacgaccgtctgttggacgacgagatggctctatgtaagctacactccatggctcagggcctattacacgcaaaaatgttgcaggattaaatgtaccagctccacattcaatatccataggctgtgcaatcacgcatcctctactagaccaatatttttgtagcataaaaataatatcttgaaagtacatgta

SEQ ID NO: 3330 - DNA, 200 bp, Lawsonia intracellularis
gttccttatttaactagtaaagaacactagatgcctagattccatagtaaaactaaacttttaaaaatcgtcctttggaccatgtaatacctaaatgatattcaacaaacgcattaattatctctgtacattcatacttttgagctgctgctgactttgtattttcagaaagtttccaatcatatggcgatgctaactga

SEQ ID NO: 3331 - DNA, 200 bp, Lawsonia intracellularis
acacgttttagaagttcaaggctttcatatcctatagcaattggagtttttatataatttatacatattgaacatacaataattccatctgaaatcccaaaaaaacctttattattaattagcctaccacattttgcacaattagaaaaaataggtgcatatccttgttcagaagctatacgtaagcgaaataaaatagg

SEQ ID NO: 3332 - DNA, 200 bp, Lawsonia intracellularis
gataatttcataaggttgagtatttttttcaaagaaatagaataattctttcattaaagtataaacaggtggtgcagcatctgaacttacaccaacaacttccaaaaatcgtatacaatttataaatgcaccaaatctatttttatttgttcgtaattgtataggcccattaattagtgatgcttcttgtaagtttaaaa

SEQ ID NO: 3333 - DNA, 200 bp, Lawsonia intracellularis
aacgaccgtttcgacttgtttggactcttacttgtatctcatttaatattccaaggcacccacagaaacgtctacggctacgatgacctccaaatgcaaaggctgaaataacaccatgctgtgaagtaagtaatttaacccatacatctgattctctaaatgagcctaactctagaataatagcattatctaaccattcc

SEQ ID NO: 3334 - DNA, 200 bp, Lawsonia intracellularis
atgtgactagttttgggaaactaaaggaagagtgatcgtttttacttgaccagagcgacctactggtggaagtttttctccattatactttaactcaataccacctgcatttccaagttttaaaacaagacttttactaaatgataatgcaactagttgtccttgttgaacataaaattgacgagtttctgtcttatctg

SEQ ID NO: 3335 - DNA, 200 bp, Lawsonia intracellularis
ctgtagagtgtacccaacagtcttctaatcccttaagaacaactatatttttcttcccaggtttattcatatgtacaggttctacaacactcttatcagatacatcagacttatcagacttatttgtcatatcagtagattgagaaaaacttttttcatctaactgggctgataattgggaactactatcttctttagat

SEQ ID NO: 3336 - DNA, 200 bp, Lawsonia intracellularis
gatagctctaattctttcttaattactatgtgatcctgaaaattctctggtatttttgtcactactacagaagaattactttttatattttcctgactctgctgctgtggtaaagataatgaaccttcagattgattttcttcttttttttgattgggtaatacctcttttttaccactatctgtcatttgagctattac

SEQ ID NO: 3337 - DNA, 200 bp, Lawsonia intracellularis
atcaaaagaactgaaggttatatcactagaataaaataaccaactacctgctaatatacataaaaaagttaagatacttccccaaacatatggcgaaaaaaactttttctttttaaaaggataatcctctccctcatcatttgttttttcagtatgctcaattcgataaaaaattgatgttaactcatactctggaatat

SEQ ID NO: 3338 - DNA, 200 bp, Lawsonia intracellularis
ctaaaaattgagcataagaacgtataaaccctttagtatatactaagtgtggcaatgaatcgattgttccttcttctattgcttgtaaggtatgaatagatatttttaaataaatactaatatcttcaagtcgatatcctttttttactctttcttgataaagaagagaaccaatctcttttaatgcagaatgtacttct

SEQ ID NO: 3339 - DNA, 200 bp, Lawsonia intracellularis
tggctattatctatatgattctccattagggcctctttagcaagctaatatctaatatcaactactgcacgtttacgaagttgatcagtatattctttgaatcgttcttcaagttttggctcacgaagaatttcttcaatataaggggtcaaagtttcaagtgtctgaggctctccttttataatattaataagctttaa

SEQ ID NO: 3340 - DNA, 200 bp, Lawsonia intracellularis
ctgaccttgtaatccatttatatcaattaaagatgtaacctctcctggcttcatagttgaaagttgttccaaccactctggatttaagtcttctatatctatagagccaagatcgccaccctcttttgcttttggaccaacagatactttttttactacttcttcaaaagatactgaaccagatttaatacgagcagccc

SEQ ID NO: 3341 - DNA, 200 bp, Lawsonia intracellularis
aatcttttgcattaatatcaggaggataaactaatattgctaattgtagctgattattatttttaagtttatcatgattcttttgataataatcttctatttctttctttgtaacaacaatttttctcccaaccattgctcctagaaggcgagaacgtaatatactactacgaatacgttctttaaaactatcttctgtc

SEQ ID NO: 3342 - DNA, 200 bp, Lawsonia intracellularis
agatgttgcaactctaactgatattgaaactcttcaggagtaagttggctcttagcaataaagttatgatattcactttcaacttcatctttacccacattaacatggagacgctctgcctcttgtgtaagaataagattactaatcataccttctaatatagctttttctaactgttcaacttttgctttatcagcagg

SEQ ID NO: 3343 - DNA, 200 bp, Lawsonia intracellularis
attattaggattaagttgttgtctaaaaatttctggagcagtttcagcttgtagatcaaataaggtaattatttctccattaacaacagcaacagtcttattaataaactgttcagcggatacaggtaatatacttataaataataacaataaaaaaataaaaaaacgcaatacttctctcctaacaatgcactaattaa

SEQ ID NO: 3344 - DNA, 200 bp, Lawsonia intracellularis
ccagttgtactaatttgtgcaataataatgtaaaacttagcttcattttaaaaaatatgcaatgtattaaaagacataacttattaccaatattaactatatacccttaataacatgtaaaataatacaacatcaacaactcattctttatatatgatattaggttggaattgaggacaaacttttatttttgcttgtgg

SEQ ID NO: 3345 - DNA, 200 bp, Lawsonia intracellularis
aataacttgttctaaccagtcttcataagcttgttccatcttttgttctaaaaggatgagctctattcgagaatatgcttcaataatgtctgcctgatgtgcaggatatcttttccgtaaaaaagcatactgataaatttcaccttctttatggcgaggagtatattctccaggtttaattttcataagatcttggcgca

SEQ ID NO: 3346 - DNA, 200 bp, Lawsonia intracellularis
ttttcgctggaagtcgatctaaagcaactcttattatgtccccttgttcaatatcattcctatcacaatctttatgcttggcttttctctgttgactgttttctacctcttgataccaaataatttcaactttttctggaataaaaaattctgaataatgtttaaagtagtattcttcaatttcatctgaagaaagagta

SEQ ID NO: 3347 - DNA, 200 bp, Lawsonia intracellularis
aactttggacgaaggatatgatgttgaaaacgctgaaaagtaagtcgttgcttcataagttgccgccaggtttcaatatctaaatattcttcctgaaggcttttttcaaagtcttctccaacataatcttgtttaatttcattctcagcaagcaatacatcttgctccgtaaccttaagacctagttttcctaattcttg

SEQ ID NO: 3348 - DNA, 200 bp, Lawsonia intracellularis
tgacattaatgtatatataattagtgtatataaactatctccatactgctcctgtaaaaaatgaacttctggtttttctctaagtggtaaaatatttccagaaacatcatgaagtgcttcaacttgttgtagtgtaataggttctccattcactatagccattacacctgatggaaaattttctacagcatatagagaga

SEQ ID NO: 3349 - DNA, 200 bp, Lawsonia intracellularis
atggaaagacacaataatatagtgtaaaaataataaatatatacagccagttaaacatattttactattttattacatgtaattaaaatatttatttattgttttatgctatcataactaaatacaacactaagctcttcttggagagaaataagtctatcctctattggtaaagttgtattaagctttatttctagtgt

SEQ ID NO: 3350 - DNA, 200 bp, Lawsonia intracellularis
agcaggcggagaaagctttactttatccggctgtgctgaaataaatagcattaacttatcaaaagatacaacagtttgtttttctggccatactaatttaatcttatcctcataaatttcagcttttattacctgtgactcagtaagaaattgcttaaaatttaacacagctataaatgctttaagttcattaggcaaga

SEQ ID NO: 3351 - DNA, 200 bp, Lawsonia intracellularis
caccaaatcgatcacgaagttctaactcaatttcattccgagccataacactttgagcagacgatagtgctttataccaacgtagtcgctcatggctatctgaaatataattttgtggtatatgcgctgtcaacccaagagttaactctgtttctggataagatgtaacaccttctccttttaacttagtaacagcttct

SEQ ID NO: 3352 - DNA, 200 bp, Lawsonia intracellularis
tcaagcatttctaaatagagctcaatcccaactctactaatatgtcctgactgtgcttctcctagtatatttcctgccccacgtattcttagatcttccatagcaacttgaaaacctgcaccaagataatcaagttctaaaatgattcttagacgttcacgagcttgttctgaaagactttcaagatcagaaataacaaa

SEQ ID NO: 3353 - DNA, 200 bp, Lawsonia intracellularis
tactgcatatgcttgcctgtcagaacgaccaactcttccacgcagttgatatagttgtccaagtccaaacatatgtgcttgatcaacaatcaatgtatttgctcttgggaaatcaaggccagactcaataatagcagtacatacaagaatatctaattctgcatgccaaaaagcatgaatattttcctcaagttgttttt

SEQ ID NO: 3354 - DNA, 200 bp, Lawsonia intracellularis
ctggcatttgcccatgtgctacacctacacgtgcttcaggaactaattcttttacaaagtttacaatttgttctaatccttggacacgattatatacccaaaagacttgtccttctctagctagctctctttcaagaatttctttaagcttttctttattttttttaataatagcagtggctacaggtttacgttcagga

SEQ ID NO: 3355 - DNA, 200 bp, Lawsonia intracellularis
ggtgcagtttctataacagaaagctcacatataccagacatagataactgtaatgtcctaggtattggtgtagctgttaaggttaatacatctacattttttttcatttttttaagtttttctttgtgcttaacaccaaatcgctgttcttcatcaagaataagcaatcctaagttaggtaaagaaactgagtcagaaag

SEQ ID NO: 3356 - DNA, 200 bp, Lawsonia intracellularis
gagcttatgagtacccactagtacatctatctgaccgcttgatgcagctttaaaaatctctttttgtttttgaagaggaacaaatcgactcaatagacctacatttataccaaaccctgaaagacgtgaacggaaagtataataatgttgttcagctaggacagttgttggacaaagtaatgctacctgacgaccttcag

SEQ ID NO: 3357 - DNA, 200 bp, Lawsonia intracellularis
aggctgcacgaaaggctgcacgcaatgctacttctgttttaccaaagccaacgtctccacaaacaagtctatccattggttcactcttttccatgtcagctaagacatcctgaatagctcttgcttggtctggtgtttcttcaaaaccaaaagaagcttcaaactctctgtataaatcaccaactggtgggtaggtaaaa

SEQ ID NO: 3358 - DNA, 200 bp, Lawsonia intracellularis
ccctttgctactttacgccaagcatacatctctattatatcttcagctactttttcaatagactttttagccttatctttacttgcttgccatgatgtgcttccaagtctatcaagctgagggaaagattcattaacacttttaaaccgttgtgttaaagaaagcctatcaacaggaagataaagtttatcattaccagc

SEQ ID NO: 3359 - DNA, 200 bp, Lawsonia intracellularis
atactctaataacaaaaagtcattagatattttacctatatccatcctaataaggccaccaaaacgggcaacgccataatttttatgaactaaaagatctcctggattgagatcatcatatcgactaagtcctttaaaagattcagctggagcctgtctgcttttcccagtgtgtggttggagaacatcttctcctaaaa

SEQ ID NO: 3360 - DNA, 200 bp, Lawsonia intracellularis
taaggatattaaaccaagaaagatcaactcctacacggaatggactaataatagcaaaacaaccctgctgtgttggatggtactctaggaatggtgtaacaccatcttgctctgcaaggttaaggaacttatttctacttcgctcagaagaaaaagacaggattagttgatacttatcttgcttccacttttttattgcc

SEQ ID NO: 3361 - DNA, 200 bp, Lawsonia intracellularis
tgtataagatgttgccagggtctatcctgttcagcaactgtaggaaataacatttggaaactagaaatagccttttctggtaactctactacttcttcctgatcatcaatatcaatatctagtgactcagtatgaactatagtagattgacaccataactcctttacttgaagagtattacgtatagctaaatctaaagg

SEQ ID NO: 3362 - DNA, 200 bp, Lawsonia intracellularis
ttgtataaatccactttctctttttaaacgatcattccaactattctccatggaagtaagaatatcttctgcttcatgaaggcttggtaatatccaaaccttatctttattaacccactgctctattgtagtagcattttcataacaacaacctggtaataaagaaaaatctttttgttcaagcaaacgaaaaagactgt

SEQ ID NO: 3363 - DNA, 200 bp, Lawsonia intracellularis
aatgttcattctcagtaattacattctctttaagcaacttgttccaatagctttctatagtggctatatactcagtacctgaacggacagggtagactggaagaataatagcattatcgatgtatcctttagatcgttgagttaatggatcaaaaaagcggatttcttctaatgtttcaccaaaaaagtctaagcggaga

SEQ ID NO: 3364 - DNA, 200 bp, Lawsonia intracellularis
ggatagtgatatcctggagacataatatcaaaaatatcaccacgtcgtgatacttctcctggatttgataccatagacactcgatcgtatccccaagtaatagcttgttcaagaatgatatctggagaaagctcttctccaactgatagttgaataacttggttatcaaaaaaatctagaggaacttctttaggaagcaa

SEQ ID NO: 3365 - DNA, 200 bp, Lawsonia intracellularis
attgtctatagtaagaataaggccttgtaccttaccatatctaagtgcatagagagcagcaagacgctcagcccaaccttctttacttaaagagcgtgatgtaaaaggagaaagtgttacccatgtgttgttaaatatattattagattttaatacattatgtcccccttctgatgtaaaaacagatataagggaatgta

SEQ ID NO: 3366 - DNA, 200 bp, Lawsonia intracellularis
aagttcctaactcatctctattacgtgctataagtaatacttttgcaccatgtgcaatgagatcaacactaagttttacttgagtagcaagtcctgctttttgtaatgcaatacgtttattttgacaacgaaggagttgttttaggcattctttatactccacagacagtccttatccaccttaaaagtatattaacata

SEQ ID NO: 3367 - DNA, 200 bp, Lawsonia intracellularis
tttataagctatttaataattatacgttaacctataggaattgattactttttccgtacttttttcatataatgtatttgtatatactttaataacagaataccaataataacacattcactaaaaagaatatgtataagtttatggccatctttaaaataaacaaaagccaaccaacgaatatttgttacgtcaatatg

SEQ ID NO: 3368 - DNA, 200 bp, Lawsonia intracellularis
tcgcagactaaaacctaatccagcagcacatataactatacagaaagatgtaataatccaccttatattaaaatggattttccatatagaagattttatataaaaatatttttttatacagattaataaaactattaaaataataagaaaaccagtaataaaaaaatttaatgtagacgtcaatacacttacacatccaa

SEQ ID NO: 3369 - DNA, 200 bp, Lawsonia intracellularis
taagtaataaaactaatgtataatacagaatatatttccttttatattttaatccaatagaaaaaaagaataaaaatatactaactacccctgtaataatgcctcctagttcaatcatccagacaggaagcaacatttctaatagtttcatattataatagcgaacaggaaacacagccataaaacataacatgatacct

SEQ ID NO: 3370 - DNA, 200 bp, Lawsonia intracellularis
gtagtgaaaataataacagaagtaattgttggaatatgtatccttatatatctccccattttgtttaagaatttgatattctcttgtgtttgttggttaacttcatacataagatacatagctgcagcaattattaatggtatgagataataaataacacgaaagcataatagtgccgcaaggatagcctggggagtagt

SEQ ID NO: 3371 - DNA, 200 bp, Lawsonia intracellularis
gtttgttaaatgaataaccacgatctcaagtactcctgcacctccagggacatgagttaagacaactgcaaccatagccattaagtaagttggaagaaattgtataaaagatatacctgcatcttctggaaggagtacatataaacatgctgacgctgctacaagatctgcactagcgacaactgcttgagctatagcaa

SEQ ID NO: 3372 - DNA, 200 bp, Lawsonia intracellularis
tattaaatggaggaaatgaaaactctttaccaaaaatatgtactggtttatgaatcagtttacaaataaaaagatatcctgcagctaatgcaaataaaacaacacctaatggacgaatatcttcagttggaaaatatactgccagctcaggaggaatagctggtggaacaaacataaaaatcagtcctgctagtccaaaa

SEQ ID NO: 3373 - DNA, 200 bp, Lawsonia intracellularis
gcaccaacccaaaaagtaatggcaagcataaggacaagctttacaatttccataggagaaaatccccaagacgaataaagtctatatcgaatggtacttcccccaagtaatgcaccaaaattataacttactgcttgccccacaaaagaaacaagtgctaccttctttaaaggaagtcttttatgaatgccttttaatgc

SEQ ID NO: 3374 - DNA, 200 bp, Lawsonia intracellularis
aagccaatcatacccaacaagaattatataatttaagatagctagcaaagcagataaaaacaaactccaataagaaatgctttcaacactcattttaagttcggaaaaactatatttactaacttcgcgatataataaatatacagcaccaataaaaatgcatgcaacaagcataatccccattgtatgcgtcattttct

SEQ ID NO: 3375 - DNA, 200 bp, Lawsonia intracellularis
taataattcttactatatcctttaacatgtattctccataattttgcaaaacaaagaatgtaatgtagtcattatgaaattatatattatttcaaccttaacttcatatacattatcaactaactttattataatatatgtaaatctaatagtatttatttctatctcactaactataattttttcctttctaccctggt

SEQ ID NO: 3376 - DNA, 200 bp, Lawsonia intracellularis
tgacctgataagataactacactattgttacttaggtgattgattcaccttttaacttacccgctgtcaaggcagcgggggtattttttctaaggtgttaggagaccaaagcatgagcattcctatttcacaacaaggttatcaaaaccttgaaaaagaacttgatcgacttaagaaagaacgtcctgctgttatccaag

SEQ ID NO: 3377 - DNA, 200 bp, Lawsonia intracellularis
ctattaaagaagcacgggaagaaggtgatcttaaagaaaatgctggatatgatgcagcaagagaacgtcaaggtatgttggaagcaagaataaattatattgagtctcgtatggcacaatttaatattattgatataacaacactttctggtgataaagctatattcggagctacagtaactgttgaagatatcgactct

SEQ ID NO: 3378 - DNA, 200 bp, Lawsonia intracellularis
ggagaaagaaaagagtttacattacttggccctgatgaagcagactatacaaaaggatcaatttctattcaatctcctgttggtagagctctacttgggaaaaaagttggtgacgaacttacagtcgatgtcccacgaggtcgtattagctatgaaattatagatatccaattcaaacaccaataattttacattacctt

SEQ ID NO: 3379 - DNA, 200 bp, Lawsonia intracellularis
tactaaagtactatttagctacaactcagtcaaagcaatttcttaatatgaataacaccccttggacattttcgattgttacatttggttgtaaagtcaatcaatatgaatctcaatctatacgagaagcatggagtaatttacatggagaagaagtagctacaccacagactgcagatattattcttcttaatacatgt

SEQ ID NO: 3380 - DNA, 200 bp, Lawsonia intracellularis
gctattaccgcaaatgctattactgatgcccgtcaattgatcaataaacttcaccgagaagcacctaactctaaaattattcttactggatgtgcaacagatttaaccaatgaagccctatataaacttcctggcgtatatacctttattagtcaaaaaaataaaacacaacttctttccaatcttccacttacacaatt

SEQ ID NO: 3381 - DNA, 200 bp, Lawsonia intracellularis
aaaccaagatcaattacaaactaacactaatacatttccacaattctctatcagtaattttaatcgttctcgaccgatagttaaagtccaagatggttgctctcactcatgtacatattgcatcataccatcaacaagaggcaagcccaaaagtcgatcaccaaaagaatgtcttatagaaattcaacaacttcttaatg

SEQ ID NO: 3382 - DNA, 200 bp, Lawsonia intracellularis
ctggattcagagaaattattctttcaggaattaatttacgtcaatatacagctactcaacaaggatgcaaagatttttgggaattatattcatttttagataaaaaactctctccaacttggaagggtattgcacgattacggataagctccctagatccagcacagctcactcaacgtggtcttgacatactttctaat

SEQ ID NO: 3383 - DNA, 200 bp, Lawsonia intracellularis
agtcatatggggtgtcaacaattacatctttcaattcaaagcggaagcgctgaaatactaaaaaaaatgcaccgttcacattatactcctcaataccttttagatactacaaaaaaactctctactatttggcacaagtttggattaggagctgatttcattataggcttcccaggtgaaacagaaaaacatttccaaga

SEQ ID NO: 3384 - DNA, 200 bp, Lawsonia intracellularis
aacagtcgatcttataaaagaactacctcttacctatggacatattttcccattttctgctcgacctaatactattgccgcaacccttccaaaccatattaaaaaatctgaaagtcaacaacgtgctgctacaataagacaactcattacacaaaaagaaaaaatttttcacaaacaactcctcaccatgtcaacattgc

SEQ ID NO: 3385 - DNA, 200 bp, Lawsonia intracellularis
atatagctcctgaaggtggaggaaaaacaggaggagttgatgaatattacactcactgtcatttaacagagcctgtcgaaacacgtcaacttctaaaagtaaaacctctatctctgacaaaaaaaggcttattagtagaaatattaccccctcattaaaaaactatatttctcttgtttcccttcaaattatcacttact

SEQ ID NO: 3386 - DNA, 200 bp, Lawsonia intracellularis
atatattaagaaattatttatccagtatagcctaacactggttagattataaaggaaaaaacatgttacgaagtatgacaggttttggtcgctgtgttgttgaagatagtgattggacccaaacatgggaaataaaaagtgttaatagccgatatcttgatcttaaatggcgcttaccacttatagcacgctctttagaa

SEQ ID NO: 3387 - DNA, 200 bp, Lawsonia intracellularis
caaaaatttgaaaaaattgtacgtaaatatgcatctcgaggtagagttgaacttaacctcaccatacaacaaatagagtcacaagctacacctctttgttttaatgaatcccaagcattatctatgcttaatgccataactgaattagcaaaaataagaggagatactttttcacctgactatatgcagttactttctgt

SEQ ID NO: 3388 - DNA, 200 bp, Lawsonia intracellularis
ttcttctttatgggaaaaaatcgaagatgaaaatgataacaatatagaaggcagacttgaagaaggacttatagctgctttagaagactggaacgaatctagagaaactgaaggttctattctttacaaagatctttcacaacgtatttcaaaacttaaagaatggttatcacaaattgaagatcaagctccttgtataa

SEQ ID NO: 3389 - DNA, 200 bp, Lawsonia intracellularis
aagaagaacgttttttacaactaaaagagcgaatttcagaagcccttgaaaaagctggaggtttattagaggagactagatttctccaagaaattgttattcatacagataaactcgatgtcacagaagaattaacgcgtctttctagccaccttgatcgactttacgaaatccttggtaaaggttcagatgtaggacgt

SEQ ID NO: 3390 - DNA, 200 bp, Lawsonia intracellularis
cgactagactttactcttcaagagtgctttagagaaatttctacatgtggaaataaaatccaagatgcccagatatctaaagttgtggtagaatttaaaaatgaacttgaaaaatgccgagaacaagtacaaaatttggaataattatgcaacgtgaaaaattaatccatctaggctttagtaactttattattgcttct

SEQ ID NO: 3391 - DNA, 200 bp, Lawsonia intracellularis
agagttattagtattgtgaatcctgcttcatcacctatgagacgactacgtgaagatgcaaaaaaagatggacgactcattgatgcaacacaaggtagaaaaacccgctctattcttattactgactctaatcatgttatcctctcagccattttaccagatacactaggacaacgttttatacaagaggaagaacatga

SEQ ID NO: 3392 - DNA, 200 bp, Lawsonia intracellularis
ctaaagaaagttctgttttaaaccataaagcttctggaactgctttagtaatatgtgctccttctggaacaggcaaaacaacacttattcaaaggcttagaaaagaatttccctgttttgcctattctatctcctgtacaacacgccctcctcgtaaaaatgaagaagatggtaaagattactatttcattagccaagaa

SEQ ID NO: 3393 - DNA, 200 bp, Lawsonia intracellularis
gaatttatagctcgaaaaaatgaaaaatatttcgccgaatgggcttatgttcatggatacttttatggaactcctcttgctccaatacttactattcttaataatgggcaagacattctatttgatatagatgtacaaggagccgcacaactctaccttactttaccatatgctaagtatatctttcttcttcccccaac

SEQ ID NO: 3394 - DNA, 200 bp, Lawsonia intracellularis
catggttgagcttgaaaaacgattacgctcacgtggaactgatcgagaagatattatccaacatagacttctttctgcaactcaagaaatacgacaagcacactggtttgatacctggatcgtcaacgaaaacattgataaagcatatgatgaactaagagctacttatttagcatccaaattatctccaaagtttcaac

SEQ ID NO: 3395 - DNA, 200 bp, Lawsonia intracellularis
caactcttattacatctatcttagaaggatggtaagaaataatggctaagcttatcgttgccttagattatacatatgcttctgaagcccttgccatggctaatatacttaaaaaacatgttgaatgggtcaaagtagggttagagctctttactcatgaaggacctagtatcattcaattattaaaaagaatggggttt

SEQ ID NO: 3396 - DNA, 200 bp, Lawsonia intracellularis
aaggttatgcttgatctcaaactttttgatatcccaaatactgtaaaaggaagtgttcgctcagcttgcttaatggatgtagatatgctcacactccacattttaggtggagaacacatgattaaagctgcactcaatgaagttcaaagttctatacaaaaaaaatcacactctcctcttctctttggagtaacaatact

SEQ ID NO: 3397 - DNA, 200 bp, Lawsonia intracellularis
tacaagtataaaacaaggagaactcccaggatataatcaagatattgcatctatggtgcttaatcttgcagcatatggtcagcaatggggtcttcatggtatagtttgttctggccaagaactaacaaaaataaaagcattatacccatctttatcatgtttgacaccaggaatccgtatgtcttatagtcaaaaagacg

SEQ ID NO: 3398 - DNA, 200 bp, Lawsonia intracellularis
atcagcatagagttatgactccaagtgaagcagttaaagcaggaagtgactttttagttattggtcgaccaataacacaagcagaacaaccaataaaaatagtagaagacattatatccagtataatgtaaaaaagaaaaaataaagctgttttttagtactgttgacatattatattgttaggaaacaaggaaatatgt

SEQ ID NO: 3399 - DNA, 200 bp, Lawsonia intracellularis
atgagtgaacagcaacaagcaaagcgtatccgtggagttttttcctcacaagaaatccgtaaagttggtacaggaactacaacacgcaagacagttagtaaaatcttctggtttgttgaacaagctgaagatggtaatatttttatacagtcaattaatacaaactatgtacctacggggttacctaaatccataactat

SEQ ID NO: 3400 - DNA, 200 bp, Lawsonia intracellularis
ggaagaacttctttcaaaatattcccctgaacctgaattttatgtacaatctgttttccctaagatgcaacaacttgcagaatcacttaataaggctgatgaaagtcgtgaaaaaggagaaacatttactgctgaatttgaatatgaaaatgcacttaaacttgatgaagaaaatgttagagcaaactttggaataggac

SEQ ID NO: 3401 - DNA, 200 bp, Lawsonia intracellularis
ttacttatctttcacgtggagaatcagaaaaagctgataatatctttgaacgtcttgtacatcttgatgctgcatttgaagagcaacataaacatctatttaatgagtttggtatcaatttaagaaaaaataaaatgtataatcaagctgtagattattatactagagcacttgagcttacaaaagcagacgaaaacctt

SEQ ID NO: 3402 - DNA, 200 bp, Lawsonia intracellularis
catattaatatggcaagagcgctatttgaacaaaaaaactacacagcatgtatagatcaactgttccaagcactagagctctctccagaaaacactacagttatccaatttttaacatggttagataataaaaaattagttcctcaaagccatcaaaaaaaagttactgataccatacaatctataacaactaaaaatag

SEQ ID NO: 3403 - DNA, 200 bp, Lawsonia intracellularis
ttctaaaaaagatgactaattccttaaagaaattatcctcaacatagagtatgaattagccaaaccaactacacttccatgaaaaaatggcttactgctcctattagttcccaaatacctttacactgggccaatattctccatattccagaacctattcttatcctcctttggcaaagaggtattacctctttagaaga

SEQ ID NO: 3404 - DNA, 200 bp, Lawsonia intracellularis
aatgaatatttttctttcccctaaacttcagtacttagcacacccaaaacactggagtggaattgaagatgcagtcgaacttttaaataatgctatagaacaaaaacaacctatcattgtttggggagactatgatgtggatggagttactggttctactgttattcgtgaagtactaacatttcatcaagctcaaatta

SEQ ID NO: 3405 - DNA, 200 bp, Lawsonia intracellularis
ttgtacatctcccagatcgcaaaaaagaaggctatggggttaatatacctgtaatagaacaattagctctagaacatccaaaagcacttctgattactgttgactgtggaattagtgatgttaaagccatataccgtgcacgagaacttggatttacagtcattatttctgatcaccatctccctcctacatctttacct

SEQ ID NO: 3406 - DNA, 200 bp, Lawsonia intracellularis
ccagcacatgtaatctgcaatccccgtataggagaaaatccttgttcataccttgcaggtgttggtattgcttttttcctgatggcagcacttaataataaacgtgctgagcaaacgggtcagcgtatggatatgagagatgttcttgatcttgtagcacttgggacacttgctgatatggctatgcttagtggacaaaa

SEQ ID NO: 3407 - DNA, 200 bp, Lawsonia intracellularis
tcgtattttagtaaaaaatggacttcttaaaattgctgaagctaagagacctggaattgcagcattgaaaactgtttctggctttactcctttaacacatttaggtgctgggcaggtaacattccaccttgcacccagaattaatgctgcaggtagattaggtagtcctcggatagcacatgaaatgctttatacaacct

SEQ ID NO: 3408 - DNA, 200 bp, Lawsonia intracellularis
caaaagactttgctattgaacatgcaactcttttaaataagataaatgaagaacgccgtagtgaagaagaatatatttttaatgcagcattagagcaagctcagttagaaaatcaaagacaaggacttgttcttcatggttctgactggcatcaaggtgtccttggaattgttgcatctcgtatcacagaagctgttcat

SEQ ID NO: 3409 - DNA, 200 bp, Lawsonia intracellularis
aaacctgttcttatactctgtactgatggtaaaatgctgaaaggatcaggaagatcaattgctgattttgacttataccatgggttatctcaatgtgctgatttatttgaacgctttggaggtcataaacaagctgcaggattaacattaccaattaaccatcttcatattctaaaagaacgatttgatactgttgttag

SEQ ID NO: 3410 - DNA, 200 bp, Lawsonia intracellularis
aaatttttttggagatacacctattacacctattcttcatattgacatggaactcccttttcaaaaagctactaactttaattttttaaaatctctagaattattacaaccttttggaataggaaaccctgaacctatttttagttctcttcctttacgtatccaacgttgtaatacatttggaaaacataaagaacaca

SEQ ID NO: 3411 - DNA, 200 bp, Lawsonia intracellularis
ttaatatgttagtagtagaagaaatctcaggcatatcccttcaagctaaaggttggagattagcaaaaaatatatcttcatccttacaaaactctcgaatccaattagcttatactccatcactcaacttttataatggtattagtagtattgaacttgaaataaaagattgggttgaactttaattaccctttatcaat

SEQ ID NO: 3412 - DNA, 200 bp, Lawsonia intracellularis
aatgaatatagagagagcatgttactaatagattatttagcatatactattcaacaggtatgatatctaaattagtccctgttaatgaacgtactccagtagctgtaatttctaatgtatgttcaagaccaactgttccaagaccaggaagacttatctttggctcaatggctataaccataccctcctgtaaaggttct

SEQ ID NO: 3413 - DNA, 200 bp, Lawsonia intracellularis
ttaaaacctgctgcaaatacagggtattcatctatggttaacccaatcccatgtcctaaaaaaggtacagcatctttacctgtacccataaatgttgcaggactctctatagattgagattcttttttagcaacattccatacctcttctggagttacgccaggttgtaacattgaaaaaactttttcataaattgactt

SEQ ID NO: 3414 - DNA, 200 bp, Lawsonia intracellularis
acaacaatcttgagctcttttaattttatctggaatagaagaaacaggaccagaccaaaaaatttgtgttttatcagtttgatatccttcaagcataaaccctatatcaactgccaataacatatgtttcttccaaatcaccccagcatcccccataaaaggaaccgcaggatgaatgcctcttcctgtaagagcaccat

SEQ ID NO: 3415 - DNA, 200 bp, Lawsonia intracellularis
taaaataggatggataattaccagactctccaacagatacataaccaagaaataattcttctccaggattattacaacgtaacataccctgatgtccatgttcaaaacaatgtttccaaataagatgggctatctcaagttcactatgacctgaagataattcttgagggagtatatcttcaagaatacgtttatggcgt

SEQ ID NO: 3416 - DNA, 200 bp, Lawsonia intracellularis
tcaccacaaatacgaatttttttacgttcccactcagatttaattgatcgcaatttttcaagaataccatcacatgacaaacagttaataccaggaacacgttgttgaaacatttctgccattgtccaagtaaatgctttcttttctatagcaatagtagaagataaaggactcccggcctcctcacaaatcgttctaat

SEQ ID NO: 3417 - DNA, 200 bp, Lawsonia intracellularis
ctctttatatgatttaaattgataaatctgtttaatgggtgattcaacttttgctctttcaagaccttttctaagaagtaatataggctctctattatcattaggaatccacaaaagcccaacacctaatgtcccagttaaataataaatattaagacgcgagcaaacaagcatcccacctacttgtgggaaattctggt

SEQ ID NO: 3418 - DNA, 200 bp, Lawsonia intracellularis
tcatagcatctctacatttttgaatccttgattgatactcacttataggaaattgttctaatgctgttatcatcgtttactcttttataactgttatatagcttattatatctaacctgttgctattagataaaaaataacaatattatagctaaataaaaatacgtttattatttatcgttatagtattactgttacac

SEQ ID NO: 3419 - DNA, 200 bp, Lawsonia intracellularis
taaaggagtttatatgcaacacccgtcagatagtacacttaaagatattctctctcaatcaaaaactattgcaattattggagctaaagatgagcctaatacccctgttggtcgggtaggacaatatctcatcaaagtaggatatacagttattccagtccatcctatacgcaaatctgtctgggggatcccagcatata

SEQ ID NO: 3420 - DNA, 200 bp, Lawsonia intracellularis
cttctattacagaaattcctgtgcatattgatattgtggacctattcagagcaccagaattttgtcctattcatgcacatgaagtcataagcttattacaaccaccacaacttttttggatgcaacaaagtattattagtccagagtcagtaaatattgttcaacaatatggaattacagctattgaaaacctttgtatt

SEQ ID NO: 3421 - DNA, 200 bp, Lawsonia intracellularis
atggctgaacataagcgattatttaattaagtaattctattgctcacatcctaaaatattaaaggatcaagttttgcattctacacatgtatataacttgtatattgagttatcacaaaaaggattatagtaaatgagcattctagtactaagtgaaataactaagcataacctatctatcttctaaaattatcgagaga

SEQ ID NO: 3422 - DNA, 200 bp, Lawsonia intracellularis
gccatggaggatgcatgatccttgataaatattataaaatcttgcatgttgataactctgcatttcttgatgacataaaacgttcttatagaaaattagcatttgctttacaccctgatttaaatccaactattcctcatgctacggctaaattccaacaactaaatgaagcttatgtaatattattaagagcatacaaa

SEQ ID NO: 3423 - DNA, 200 bp, Lawsonia intracellularis
agtaatacttctaaatctcattcaaaaactactacaaaacagtctactactaatgctacacaacagaaaaataaagagagggataaagcttatagaaaaaataaaacagagtatataaaaagtactagcaaaaaaactcactctaaaaacccacataagaatagtatatttgaagcatctattgatgaaaactttgatga

SEQ ID NO: 3424 - DNA, 200 bp, Lawsonia intracellularis
aaagcaaaaaatattacaggatattttgaatgacgactttgctaggaatgtatttgaagatatttttagaactatccaaaataagcaaactaaatcttcaaacattcaagattcatccactcaaaattcatcacaaaataaaaagccatcaattataacaagactttttcaaaccataggacaaattactcattcatttc

SEQ ID NO: 3425 - DNA, 200 bp, Lawsonia intracellularis
aaaaaggacaacaccccaatacttcatctccaaacaatgtaaaagtcacatatgggggaaaagatgctccaaacacagttaaatcatggttgaaaagtcaaatagatgaagaacaaactattgaacttcctgctaccgcacttaggcctggatcacgaatccgtttaaatattcgacaaggattctcagaaaaattaaaa

SEQ ID NO: 3426 - DNA, 200 bp, Lawsonia intracellularis
gtacttgatcttacgttaccatcagattttacctttaataagcaactctattttaaaggtatgggtaaaaaacttggacgatggcaaggagatctctatttacgttttatacctaaacgatcataataaagaagaactaaacgttatcaaagaaacaatgttattataggagcattggactcatgaatatccttatattt

SEQ ID NO: 3427 - DNA, 200 bp, Lawsonia intracellularis
ggacctaatggaagtggaaaaggaacacaaggtgaacttatacagaaagcttttggtattacacatattgaatcaggtgttatctttcgtgaacatatctcaaaaggaacagagcttgggaaacaagcaaaatcctatatagataaaggtgaactagttcctgatgatataacaatccctatgattttagaaactcttca

SEQ ID NO: 3428 - DNA, 200 bp, Lawsonia intracellularis
aattaaagggaaaagcggctggttattagatggattccctcgtaacattacacaagcacaaaaacttcatgaagctatgctcaaaaaaggtgtaaaacttgattatgttatagaaatcacactacctagagaagttgcaaaaagtcgtattataggtcgacgtatttgtaaaacaaacaataatcatcctaataatgttt

SEQ ID NO: 3429 - DNA, 200 bp, Lawsonia intracellularis
ctattgatagtattaaacctgatggaaacaactgtagagtctgtcatggagaactcattgttcgtacagatgatcaagatgaggaagccatcaataaacgacacgatatttattataataccaaaacagggacactatcagctgctcattacttcaaaaatctttctgaccaatatgaaacccactatattcttgttaat

SEQ ID NO: 3430 - DNA, 200 bp, Lawsonia intracellularis
ggacaaaatactattgaagaaatccgaaaaacacttctagaagatcttggtatatcctcagaagtttcttaacaaactgtttctgtgttaataataattatttctttatgatagaaataaaaaataaatatttaagtaatactttaacataatatttctattttttatataatttcctccattcatctaaaaataaaaga

SEQ ID NO: 3431 - DNA, 200 bp, Lawsonia intracellularis
gatgtctcaataggtgacaacacacctgattcttgtcttattgcaaaaattatatcatcaaagttgctatctgtagttatttttaatttattaaataactccttaagttcttctttatattctgtagaaactgcatcaggtaatgacataatagctctctcttttggccaatcaacagcatgttctgaaatataggataa

SEQ ID NO: 3432 - DNA, 200 bp, Lawsonia intracellularis
taaatccctcattctttgttgataagtatgctcagtaagaactctacgcctaccacgttcagcaataacaaatcgttcttctgggcgtgcaagaaaatattgtatcttttcctttaactcttctatagtagtaaacgtagctatctcattctctgaaaaaagttctgataacagttggcgttgatcaacgagctgaaaag

SEQ ID NO: 3433 - DNA, 200 bp, Lawsonia intracellularis
cctcacatgaggctatctcaaatgttctaggattgacaaagtctccattagaaacaaatggcttgtgttttatatatgaatgaagattaatattgatttttgtaccattataaatttttacagcatcttctggagagatacgcttaccatcacattgaacatttggtctaagaaaacaatcattatcccaatcatttccc

SEQ ID NO: 3434 - DNA, 200 bp, Lawsonia intracellularis
catattttaaattgaaattgagtaagttgtcgaaatgctacacgacgattaggatatccagctcctaaaaatgaaatgtctgatccatattttttttgatccataggagaaagatccataggatgatgaaaagtaggaagtgcagccattggtaaataacaactattagcaacaccaacagatgcaagctcttctaaaaa

SEQ ID NO: 3435 - DNA, 200 bp, Lawsonia intracellularis
tggctctttctggattacaaagaaaaaatcataataaggagcaaaatttctccaatacgtaaataacctaaagtcttcaacaaaccacattgcagtgaggatattatctcttttaaagcgttttagtatttgtcgagttactggtgcctgtgcaagacacaaaactaaatctgcttcaatttctgtggctttaacataaa

SEQ ID NO: 3436 - DNA, 200 bp, Lawsonia intracellularis
tagcttgtgaaatgttttgtaaaaatgatgcttcaagctcttctaacttactatttcgaatatgtagacccttaagggcagtaaatgatccccaaaaagaaggtgaatcaaagacttctacacaatgtccaagatcttttaaggcaatagtacagtattgtcctataggtagagaaccaccataaaaaggtaatactact

SEQ ID NO: 3437 - DNA, 200 bp, Lawsonia intracellularis
agtatgcgtaatatttgttgtttcatattcatctatctggcaacatccagtctgcctctgaataaagattcatagctaaacgaccatcagctatttctggaaactccttagaagatgctatagtaatcccttgatactccattaataatgctctctgagccattctaacagatttaacataggtattttctctatcattt

SEQ ID NO: 3438 - DNA, 200 bp, Lawsonia intracellularis
ttccagataagccctaactcatcaaaagaagactccaaacaagccattgtagttgataactgttcctttataccaacaatagatttatggaattcaggactactatatgctttcaaacattttacatttaaattgcatggcttagattcaatacatggagcacagtctatgactgcttgccataccttatgaccttctcc

SEQ ID NO: 3439 - DNA, 200 bp, Lawsonia intracellularis
ataaggaccagtttcccatgcccaagctgaagacaaaaacataccacaaacaggaacaccaagtcttgcagctaaatgcataatacctgtatctggtgtaacaactaaatccaaatcagatacagcttcaaccagctcattccagttagtttttcctgcaagattttcagttttttctataagtttacttggtaaatatg

SEQ ID NO: 3440 - DNA, 200 bp, Lawsonia intracellularis
acattaaagtacgtccaatagaacgctctgttttactaccaagtaaataaatcttctttcctgatgtatgctcaaaaaaaatacgtacaagaggagctaatatttctggaggtagagagcgtcgtgcttgacgtcctgcaaggacaatacctaaaccttttcctccagattttgccacaggattaacatcctgaggtata

SEQ ID NO: 3441 - DNA, 200 bp, Lawsonia intracellularis
actggatttggagctaacataccccaaaaatcaactaaatttagtggagaaactttacgttgtgctgtccatctgaaccccatctttatccatttttcagtaacaggttggccatcctttacaatataacctctaactttttctgaaggaaatagtgtagcaaaagccatattcacacctgagtagttcagattgtatat

SEQ ID NO: 3442 - DNA, 200 bp, Lawsonia intracellularis
ttctgtaaactccaaaaaatgaagttcattaaaaactctataattatctctaataacctgctgtactccactgtagtgtgcaataattccatgtacaatacatttagggtagatagcttctgctaactcaacaagtgttttatctacacaaagatgaacttccccttctctaagtagtgaagctataagtcttgcagttt

SEQ ID NO: 3443 - DNA, 200 bp, Lawsonia intracellularis
ggataatatcaccaaatctagctagttgaatgactaaatagcgcttcataacttatgccttgttagcttacttatcgaaaaagtagtctcccatatcaagtatagttattataacgtttagtttaagataatacacctatatattacatatatctttagagaagttattgttataatcatctataaacttaatgtattac

SEQ ID NO: 3444 - DNA, 200 bp, Lawsonia intracellularis
ttgatataatatgtctcttttataatataataacataatattagatagttaccattttataccttgaatgctagtataacttattattattattattatttatcttatgaatactaggacaatatttattcataaaaagataataaatgatactggatttttcttcttatcttgtttagcgtataaaaatacatatagtt

SEQ ID NO: 3445 - DNA, 200 bp, Lawsonia intracellularis
aagaatagttgattgtgggtaaaaaggtattaccatcaaatataacaaaaagaacatgtaataatcagatgtaaatatcatactatgcagtattatcctctctttattgatcttacttctgcaaactgtcttattgttggtgctggtaatgttggtagacggaaattgtatagccttattaaagctcatacaaaacatat

SEQ ID NO: 3446 - DNA, 200 bp, Lawsonia intracellularis
tcttattgttgatcctttaccaccaggacaagaacttaaagcattgcttaaagaaaaaactgtatgttacaaacaacgaacatttattactgaagatatattagaaaagacgttagtttttgcagccacaaatgataaaaaacttaatcaatctattgctacctattgtaatttaaaaggtattttatgtaatattgctg

SEQ ID NO: 3447 - DNA, 200 bp, Lawsonia intracellularis
atgcacccagtaaaggaacctttatagttccttcaattgttgaaaaaaatggtatttctattgctatttcaacaaatggtaatagccctgctttatctaaaaaactacgtaaagatattacagaatggcttggagatcgatacacacctatagtcacacttctatcaaggttaagaccactagttcttaaaacatctaat

SEQ ID NO: 3448 - DNA, 200 bp, Lawsonia intracellularis
attaccttagataatacaacattatttaataacattcttgattctgcactctctgatgctattcaacaaaaaaatcgtcttcaatgcgaagaaatattaaaaaatacacttcctaaccacttacaaatacatattatggaattacttcatgagctggtctgaattacttccaataatcattgttcacttttatgcactag

SEQ ID NO: 3449 - DNA, 200 bp, Lawsonia intracellularis
gcacaatcactattgtatctggagtattatctcaaactaaatggttaactagaattgctttctggcttatctttttaggggttataactcatactgctctactcattttactatgggaaacacctttctctactttcacacaacctgtttacatgtttattctttcatggcttataatctttattgctcttattatttgg

SEQ ID NO: 3450 - DNA, 200 bp, Lawsonia intracellularis
atttattgtaaatatgaaaccttgcttcttcctatggttccactggctcttctcatatttctatttgcattattattacgccataccaaaatgccacttcctcctgcacttccaggtataacctttgctgtccatattactgctatgtttttaagcattggtctaacatctcttggttttggagctagcattcttttctt

SEQ ID NO: 3451 - DNA, 200 bp, Lawsonia intracellularis
actacaagaaaaaagtatcaaaaagaaaatacctctaataggatttcaaaaagatattccagctcttacaatccttgacaagattaatgctttatctgttatgataggttttccattatttagtataggaatattatttggtattgtttctgcccgtctaacatggggtaatctttttgtttttgatcctaaagaggtta

SEQ ID NO: 3452 - DNA, 200 bp, Lawsonia intracellularis
taagtcttattgcctggtgtttatatgcatggcttttttaccaacgctttactcatggatggcaaggacgtaaacctgctatattagctatttggattttctgtatttgcgttttttctcttgttgtggttaacttttttacagaaacctatcacaatttttacgttgagaagatgctgagaagatatggaacaacatat

SEQ ID NO: 3453 - DNA, 200 bp, Lawsonia intracellularis
ttatcttataggcatgaaccatcgtacagcaagtattgatgtccgagaatgctttgcactaacggagcattgctcaaaagacgattgggcaattccattaataaaaggtattcaagaatctcttatcctttctacttgtaatcgtgtagaaattcttgctgttggtgatagtaacacacctgaaattattctttctgctt

SEQ ID NO: 3454 - DNA, 200 bp, Lawsonia intracellularis
gggcaaaagtaaaaacacgttctatagaagagcttgttccacacacatatacttaccaagggcgctcagcaatttcacatctcttctgtgtggcttcaagtttagactctatggtgttaggcgaacctcaaatactaggtcaattaaaagacgcatataaacttgcaacaatagctggagcttcaaaaacaatccttaat

SEQ ID NO: 3455 - DNA, 200 bp, Lawsonia intracellularis
agacttcttcataaagctttttctgttgctaaacgtgtccgtacagaaacatctattgcttctaatgcagtatcaataagctatgctgctgtaaaacttgccaaaaaaatctttggtactatgaatcaatataaagctatgcttattggtgcaggagaaatggctgagcttgctgcaatgcatttaatgcaagcaggtat

SEQ ID NO: 3456 - DNA, 200 bp, Lawsonia intracellularis
tcaacaactaaaaattgttaatagaacatatagtcaagcacaagaactagcttctcagtttagaggagaagctattccttttgaaaaacttgttacctatcttgcagaagtagatattgttataagttctacaggagctcctcaaaccatcattcacttcaatgatattaaaaacatactcagtaaaagaaaacattatc

SEQ ID NO: 3457 - DNA, 200 bp, Lawsonia intracellularis
ccatgctttttattgacattgctgttcctagagatattgatcctaatgttcatcagctagataatatctacctttatgacattgatgatcttaaagaaattgttgaagataatattgtacaacgacaagatgaagctataaaggcaaagcatataatacaagatgaaattgactctttttgtgcatggttacaagctctt

SEQ ID NO: 3458 - DNA, 200 bp, Lawsonia intracellularis
attttacaacccactattgttgacttacgaaaacgcttttctacttatgcagaagaagaacttgaaagaacattaaaaaagattggtcctgttgatagaaaaactcgagaagcattagaaactatgatcgatgctctcattcgaaaacttacccatgatcctataagttatttaaaatgtgctcatcgaactattgacac

SEQ ID NO: 3459 - DNA, 200 bp, Lawsonia intracellularis
taaccatataaccttagcacggcagatgtttaacctagataaaattcctcaaacaaacaaggctgttaatgaagactaacaatggatctaggtatcttttcttccctaacattaactatgatacaatccttttacttctagtaataataacgtatatactatttgagcaacattaaacttatcacttctaccattcaagg

SEQ ID NO: 3460 - DNA, 200 bp, Lawsonia intracellularis
tttatctatgggcttcttttcctccttaaaaaatgcattattatcatctaatagtaaggtaactaattctacaaagttaaatatagagctccaaccatccacaacaactgctaacaatggctggaaagagcaacttattatatcattacggcaagcaaaacctcagctctctctttggttagatttaacacttaaaggga

SEQ ID NO: 3461 - DNA, 200 bp, Lawsonia intracellularis
tcactcatgcaaatgaacaactatgggaacgtgttacctttttacttgttaccttaggagtttctgaaaatgaagccagagcttttactcaaaactttcaacaatggtcaatggatctaggctatacaaaattaagtgattttcgttctgaacttcaatatagattatctctcactcttgaattagaagatgaagaaagt

SEQ ID NO: 3462 - DNA, 200 bp, Lawsonia intracellularis
gagcaaaatagattactaaccaaaatacatacaggacttgctaaaacaagagaacatcttagccaaggactaaaaactgttttttctcatcataaaaaattatctaacgacttttgggatgaactagaagaactttttattctttcagatatgggtgtagaaacagcagaaatgttaacatcccgtcttaagatacgggc

SEQ ID NO: 3463 - DNA, 200 bp, Lawsonia intracellularis
caccaaagctaatatttctataccagaagagctttctcctttacttgctaatgaattagaaattattttaaaaatttctcctcgtgttttagctatcaatcctcctgaagttatcttgcttattggtgttaatggggtaggtaaaacaaccactattgcaaaactagcatatcgaatgcatttacaagggaaaaaagtcc

SEQ ID NO: 3464 - DNA, 200 bp, Lawsonia intracellularis
tacttgctgcagcagacacattccgtgctgcagctatagaacaattagaagtatgggctcaacgtattggcattgtattttataccaaaggaacaggagctgatcctgctgctgttgcatgggaagctgtagaacatgcaatccaaaaacagtttgatgttgttcttatagatacagccggacgtctgcatacaaaaaca

SEQ ID NO: 3465 - DNA, 200 bp, Lawsonia intracellularis
aacctcatggatgaactctcaaaaattcgtaatgttattgctaaaaaacatcctggagcaccacataggacaattttaattattgatgctacaactggacaaaatgcattacaacaaacaaaagtctttaaagaatccacaggaattgatgaaataattgtcactaaacttgatggtactgccaaaggtggtgtagctat

SEQ ID NO: 3466 - DNA, 200 bp, Lawsonia intracellularis
tgctgtttctctacagtatggtattcctattacctatgttggccttggagaaaaaatggaagatctacagccattcaacggagaaaaatttgctaaagctttacttaatatttaatattccaccctcatataactataattagtatatctcatactatttaatgatcaaacaaaagaaataataatggcatacattcttc

SEQ ID NO: 3467 - DNA, 200 bp, Lawsonia intracellularis
ctggatcatctttagatgcagatctttatgcaattacagatgatgcactttcttttaacaggtctgttatagaagttgttaaacaactattagatgctggaataaggattatccaatatcgtgaaaaaaataagtcttcaaacagtatgcttaaggactgtataacgatcaaaaaattaacagaagaagctaatgcatgt

SEQ ID NO: 3468 - DNA, 200 bp, Lawsonia intracellularis
tttattgtaaatgatcatgtagatattgcagtactatgtaatgctgatggagtccaccttggacaggatgatctcccagttgataaagtacgggagcttataggaaaagaaaaaattattggactgtcaacccatagcccacaacaggctcaaaaagctattgaaatgggcgctgactatattggtgtcggacctctcta

SEQ ID NO: 3469 - DNA, 200 bp, Lawsonia intracellularis
ccctacaaaaactaaaaaagacgtatgtgaacctgttacaattagctatcttgattgggttgtcagccatatagctattccttttgttgctattggtggtatcaagcaacataatatccaagaagtcattcaacatggtgcaaagtgttgcgcacttgtctcagaaattcttagtgctcctaatatacctttacgtatac

SEQ ID NO: 3470 - DNA, 200 bp, Lawsonia intracellularis
aagaattacgtcaagctatactattggctcatacatagtgatagacctcttatataaaattcttaatatcctcttttcttcttatagtcattataataagtaattctttagagtctatactaatataaaggtagtatcttttataagttataattcattgaagaatagttatttttctaatagtcgttttgaaattgctt

SEQ ID NO: 3471 - DNA, 200 bp, Lawsonia intracellularis
gagctgctttccttccagcatccattgctaatacgacagtctgtgcaccagtgacaatatcgcctccagcaaagacattaggaatagatgtttccccaacctcatctgtgagaatatatccttcatgcgtaagtttaagaccttgtattttctctaataatctttggtttggtttacttccaatagcaataatagcaaga

SEQ ID NO: 3472 - DNA, 200 bp, Lawsonia intracellularis
tctgttgtatattcaaacagctccccttttataggtatagcacatctacggccagaggcatcaggttctccaagagtcattctttgcaaggttacagaacataatttgttatttttatctttgtgaaaagcaacaggagctactaactccataatgtttacaccttcttcttcagcatatgcaatctcttcatctcttgc

SEQ ID NO: 3473 - DNA, 200 bp, Lawsonia intracellularis
tggcatttctgactttgtacgtctatatatgatatgtactttttctgctccaaggcggatagctgtacgtgaagcatccatagctacattaccagctccaaaaactgttacagaacgtcctagataattattttgtaccgatagtaaacgttccttgtctgactgattgacttttatatcttttagatacttggtagcta

SEQ ID NO: 3474 - DNA, 200 bp, Lawsonia intracellularis
aaaaaactccagaaatatcttcaccaggaatacctaactgacatgatagtccagcacctataccaataaaaatagctttgtatccttcatcaaaaagatgttgaatagttaaagtatcccctataccctgtgtactaaatgtcacacccatactacgtaatgctttaatttcatcactaacaaccgtattaggcaaccga

SEQ ID NO: 3475 - DNA, 200 bp, Lawsonia intracellularis
aaagtaggtataccataggtaagtatacctccatgttcatagcatgggtcaaaaattgtaacaccaatgccctgagctataagataacctgcagccgtaagtgatgccggtccagaaccaatacatgcgactttacaatgtgtaactacaggaggctttgcatcatattcattcaaaccaacatataatccaacttccat

SEQ ID NO: 3476 - DNA, 200 bp, Lawsonia intracellularis
atttaatatagaatctgctacatatctttctaaacgaccaatacatacaggattaccttttgcctttagaacacaagaaccttcacactgtgtatcttgaggacaaactcttccacaaattgcaggtagactattagttgtgcgaataattctgtatgcttcttttaaatctccacttaataatgcagcaataaattctg

SEQ ID NO: 3477 - DNA, 200 bp, Lawsonia intracellularis
ggatacgtacctgagcaggacaagcttgcttacagcgtggtctcttacactgaagacaccttgatgcttctatctttgcttgttcatctgtatatccaattgcaacttcatcaaaattacatatacgattactaacaggaagacatggtgtaccactactcaacactcctcctacttttttatgaagaattgtcataatt

SEQ ID NO: 3478 - DNA, 200 bp, Lawsonia intracellularis
ataacctaataaacagaatagcattcttaaataacaaaaaaattcaactctaatatagaatgatcttttctttctaacataaaaaataaccttcttactcttagctagaaaaaatagattttcttctatgttgcaactttaactataatataagaagataggtataatacactctatacccatggttaaaaatagttata

SEQ ID NO: 3479 - DNA, 200 bp, Lawsonia intracellularis
tatgacctaacattaattaacaatatctaacttataaaaaacctttttatgaatgaaacgtttactgtatatttagctccacatggttttttacaagaacttattgatgaaataaatacaaatattatttgtagtaaaggtcatcttatacttgtaaaaggttctcctaaaaaatttgcatgggcacaaaatacatggtt

SEQ ID NO: 3480 - DNA, 200 bp, Lawsonia intracellularis
aagtccaagatttatcccaataagctctattacagatggagcaaaaaaacttttatctattcaaagaaattggtggttacattctgaaaaccatcatcgacgtgcaacattaattcaacaacaattaccttatgtttcagccaaaaagcttcactttggagaaatacctcctcaaacacctcttggaagttggactttat

SEQ ID NO: 3481 - DNA, 200 bp, Lawsonia intracellularis
gggaaaaagacatcatcctagcatcaccagactgttcatcagtatttcctgatggagttattacatttcatgaaaataaaatagaaccaccaagtagagcatatcttaaactttgggaggtttttacacgcttttcttttgttccatcttataaagagttatgtattgatcttggggcatctcctgggggttggacatgg

SEQ ID NO: 3482 - DNA, 200 bp, Lawsonia intracellularis
gttcttgctaagcttggtagtagtgttattagtattgataaagcaccattagcttcacatatatcttctcttcctaatgtagaacattatacaggaagtggctttagatttactcctcttcatattggtaatgttgattggatattctcagatatggcttgttatccaaacaaactttataactttatccaaccatggat

SEQ ID NO: 3483 - DNA, 200 bp, Lawsonia intracellularis
tattaataaaaactgtcacacaataatctgcactttaaaacttcaaggaaaacctagtaatagtactctttcttgctttaaaaaaattcaatcatcttacctcatacatttatcatataacaaacatgaacttacatggatctattctactaaatacccattagtaatgttgtaatttatatttttatcaaataaaataa

SEQ ID NO: 3484 - DNA, 200 bp, Lawsonia intracellularis
atataataacaagttaactaaacctatctttattaagaaatatataatactactataaacaaattttttataacatataatacattaaatctatgactaaggtttttattgacaataagaagaatacgttgcaaaaaactctgtagagtttggtttactttataaataatggagcagtttatgaccaaagcagaacttgt

SEQ ID NO: 3485 - DNA, 200 bp, Lawsonia intracellularis
tgatatgatccatgcaaaagcaggacttcccacaaaaacaaaaacagaagaaacctttgatgctattattaaagtccttaccgaagctattgcttctggttctcctgtcacttttactggatttggaagttttaaactttcacaacgtgcaccacgaaaaggtagaaatcctcggacaggaaaagaaattaatatacctg

SEQ ID NO: 3486 - DNA, 200 bp, Lawsonia intracellularis
cttgtaaggtcgtaaaatttacaccaggtaaggctcttaaagaagctgtaaaacaataatttgacctttaccaggcaatcattctatctgtaataaaagccattcaaattgaatggcttttattacagatagtgtaatagtaaaatgacaggaatctattaacctaacaatatgtataatcaactattagatatgttgta

SEQ ID NO: 3487 - DNA, 200 bp, Lawsonia intracellularis
atagtatatttataattactgaataaaaactacactactaccaaaagtcatgctataaacaaaaaatactatagcaaaaatcatagataacttatgtctcattggattattactcaatgcaatttttgtccaaataagagctgaaatgaggcctaaaccaacactgactgtagctataggccaccctataactataagag

SEQ ID NO: 3488 - DNA, 200 bp, Lawsonia intracellularis
atattacaacgttatacagcataaatactatgaaacttattaaaaatatccaagcaccataggccgcccaaacaccacaccagtttgcagcaactacatagtaatcacggccaaaattatctttattgcgtcgtatccatagccaaactaaagcaattccagcagcagcagcagcttcaataaaatgtgtaataaataca

SEQ ID NO: 3489 - DNA, 200 bp, Lawsonia intracellularis
ataagccataatggactcgtcaaagatggaaaaatcaatccaactataatactaaaatcagtctcacgttctaatgctacaaagtctcctgaaaagatatacccaaataaaaatatagagatgattataaagctagaataacatattcctgataaaaaacttaatagtatatataaaataggcgatccaattaacctata

SEQ ID NO: 3490 - DNA, 200 bp, Lawsonia intracellularis
ccataaaacaatacaaataagctgaaagataaatcctagataaaaaatactacacgttacccaaaatatatattgatatattggaagaaaatgttgaatatcagaataatatattcctgtaactaaaagtaatataagaacaaagatacttgttaaaataactcctaagtacattaattgatatgcacattgtatataga

SEQ ID NO: 3491 - DNA, 200 bp, Lawsonia intracellularis
gcttactttgtttaactataccaaatactatggtaaaacaaacaataattggcaataatgcagaagctagcaaaaaaaacaaaggaaaacctatagataaagttagcttatttagaaattcaattgctagataagattccattgtctctccaataaatcaaaataattttagttaatttcctaaattaggtatcccccat

SEQ ID NO: 3492 - DNA, 200 bp, Lawsonia intracellularis
acgtaggtaagttttataacatctactaataggagaattactatccaaaaccaaagaatcactttgttcagcagcatgctgccttggaatctttaattttctaggtatatttctttgatttacttgttttttataaactaactgccttcccatacacaactgtaaatcaaccttatcaaaaaaagttctatccataaagg

SEQ ID NO: 3493 - DNA, 200 bp, Lawsonia intracellularis
catttactctctcaagtaactcttccttcatataggctagttcttgtaaagccattgtatcctctccaccaacaatcaatgttttttcacgtctacccaaaggataagcaataccttctaagtatggtcccattaccatactccaattcctccatagttccactaaaagtttttcttctgaaccactacttaaatctaat

SEQ ID NO: 3494 - DNA, 200 bp, Lawsonia intracellularis
aaaaatgtctctatctgctctttaatagaagacattctaaggattcgtttattatattccagagaaaaatgtttctttttcataatggtgaaaatatataatacaaaatagtagcaatacaataaataattttatactgtcttaatctataagagtaaatattttttactttaattaatattttttaacttaaaaaatat

SEQ ID NO: 3495 - DNA, 200 bp, Lawsonia intracellularis
tactttttattttagttactatttttttataaaatttgaatattataattatatataataaaatttttatataaaaaactatatcacaataaatagatagaaaagtgtatctttattttgtaaataaatgtacaatttaatacttatatcagtatattgaaatacattttttttctttctttatactcttgcttcaggag

SEQ ID NO: 3496 - DNA, 200 bp, Lawsonia intracellularis
aaacacttatgcgctaccacacgcatgtttcagatcaaacactacaagccatacaaaacaatgagtggctagaaacaaatattttgggagattattcttcaagtacgcttagttttaaaaacactcggaaataccatggattacttattgcaaatcttgaacaaccacatggacgccacttacttgtttcaaccttagaa

SEQ ID NO: 3497 - DNA, 200 bp, Lawsonia intracellularis
gatgcaataataactaatgacataacttatgaaatatcttctcgtgaacatgaaaatattgtttatccagatggacttaaacaccttatttccacagggataacctattgtcctcaatgtatatatacattagacgatatacaaatctgtcgagaaataatgctccttggtgatcaaaatacaacacttgtacgttatac

SEQ ID NO: 3498 - DNA, 200 bp, Lawsonia intracellularis
cctctatggtgctaacaataagcgtcatacattaagaattaggcctttattagcctttagaagtatacacaagctatcaactgccaacgacatattacgtaaagatgtagaaacagtctataatggtttttcaataaaaccttatgagtctcttccaacactatttgttcaatcctttgatccacactcatttatttata

SEQ ID NO: 3499 - DNA, 200 bp, Lawsonia intracellularis
caccaaactggtactatgctattgagtaccctatagaaaaagaacgtggctatccttacaaagaagatctttttgttcctggagaattacatatagacttgcaaccctatgctcctgttatcataagttttagtactaaactcctaactacaactgaaaatcccattattttatggaataatgaagtaatacgccatcaa

SEQ ID NO: 3500 - DNA, 200 bp, Lawsonia intracellularis
caaattaactcttcagaacactctattacaacgacactatataatgcaggcgaacaactttttacgactatttcaaaagaaaatagcaatattgttgctggatatcattggtttgattcatggggaagagatacctgtattagtttgccaggtctttcattctgcacaaataatattgaacttggtaaaaaggttatcaa

SEQ ID NO: 3501 - DNA, 200 bp, Lawsonia intracellularis
aacagctattgattcaatgcgctatggtataatacctaatatttttggtggaaatgacaaatcacatgctttcaattgtattgatacttcactatggtttatttgggccattcaacagtttatgctcactgaacctcaacaacaagaatggatttacgaaaactgctggagtgccataaagtctattattactgcttacc

SEQ ID NO: 3502 - DNA, 200 bp, Lawsonia intracellularis
gtgatccaacaatatctggatgtactattgatgaatcaggccttattgctgcaggaaccccaataacacaactaacttggatggatgcatccattaatggaatccctgtaacaccaagaaatggatatcctgttgaaattaatgcactatggtataatgcattagccttttcaggataccttgcaaaactctataaagaa

SEQ ID NO: 3503 - DNA, 200 bp, Lawsonia intracellularis
ccatttgatacttactatcaaccacttgatactatgcgccaagcttttaaagagcggtttctaacaaaagggatatattactacttaggtgatgtatggaataacaatctattagacacttctattcgtcctaatcaactatttgctatttcacttccttttcctattcttgaaaaagaatatcatgcagatgtattacg

SEQ ID NO: 3504 - DNA, 200 bp, Lawsonia intracellularis
tactgtaacaacgacattacttacaccctatggattaagaactctagacccatctaatcctgcctacaaaggtatctgtgagggatctcaagaagaaagggataaagcatatcatcaaggtacagtatggccatggcttcttggtgcatatggtgatgcattactccagtcagcagccttcccagaacttgcattacaac

SEQ ID NO: 3505 - DNA, 200 bp, Lawsonia intracellularis
aacttcttttctttcttactccactgtttactattcaccttgaagaggcaggtataggctttatatctgaaatttttgatggagatagcccacatcttccaagaggatgtattgctcaagcttggagcattggagaatgtataagacttctctaccgtagtgaaaaagaattccctactgtttttaaaacatggaagaat

SEQ ID NO: 3506 - DNA, 200 bp, Lawsonia intracellularis
tatttagcttcttataaagaagcgccactttatgatacaacaaccttaacaagatatttaaaataacttggaggagcataaattatgcgtattctcatgtttggttgggaatttcctccatatttaagtggaggattaggaacagcatgttatggaatgactcaggctcttattcgatcaggagccaaaattgtctttat

SEQ ID NO: 3507 - DNA, 200 bp, Lawsonia intracellularis
tcttcctcgatcagaacacagctcacgctatgtcgaacaaaataaacattttcctaaaatacgttctgctgctgatgtttgtattacacaacataaacaacttggttacttcactcaacaatttcaagaaatctggaagaaaaacttttctatccgtcctattaaagcaacacttcatccatatgtttcctttagtcaaa

SEQ ID NO: 3508 - DNA, 200 bp, Lawsonia intracellularis
cactttctgcttattattctactcagaatcatttaactgaacacaatgaattctctacagttagttcagcatgtgctttacctccttgttctggtggatatggtccacacttaatggaagaagtattccgttatagccaagctgctgcacaaatagctatggaagaaatgtatgatgttattcatgtccatgactggatg

SEQ ID NO: 3509 - DNA, 200 bp, Lawsonia intracellularis
acataccctgctggaatcatagctaaaaaaattagtaataaaccacttattgcccatgttcatgctacagaatttgatcgatgtggtgactcacctaatcaagatattctaaatatagaaaaggttggtcttgagcgtgctgatcatattattgctgtcagccactatactcgtaatcttattatgaaaaaatatcatat

SEQ ID NO: 3510 - DNA, 200 bp, Lawsonia intracellularis
tccaggagaaaaaattagtgttgttcataatgctgtacttccagcatctggaaattatacatggcagaaaaaaagaaattcaaacaaaaagtatgtactcttccttggaagagttacacatcaaaaagcccctgaacactttataaatgctgcatatcttgtttcaaaaaaattacaaaatgtatgttttatcatggctg

SEQ ID NO: 3511 - DNA, 200 bp, Lawsonia intracellularis
gtagcggggatatgttaccctcaatgatccgtaaagtagcttcattacgccttgggagtcgtttccactttactggctttttacataaccaacaagttgaacatatatattctcttagcaatgtatatgttatgcctagtatttctgaaccatttggaattacaccacttgaagctataagacatggaacacctgtaatt

SEQ ID NO: 3512 - DNA, 200 bp, Lawsonia intracellularis
atatcaaaacaatccggagttagtgaagtattaaagagtgcactccaagtagacttctgggatatagaaagacttgctcatttaatttgctctttacttacatatccaaaacttgagaaatcaataatgggactagcttataatgaactacaaagtatccgttgggaaaattcagctcaacaactttgtcacatttactc

SEQ ID NO: 3513 - DNA, 200 bp, Lawsonia intracellularis
taaatttaacaaaaatggacaataactatgccctctatttgcttttactttcaagtacatcaaccttttaggctaagaaactattctttttttgaaattggcgtaaatcctttctatgaggatgaagaacataaccgccatgtgatgcataaagtagcaagaggctgttacttaccaatgaatagacttttgctaaagct

SEQ ID NO: 3514 - DNA, 200 bp, Lawsonia intracellularis
tattcatcaatatgatcaaaaatttaaaataagtttttctatatctggaacagctcttgaacaattcgaacgctattccccagaagttattacaacatttcaagagcttgcagatacaggctgtgtagaatttctaacagaaacttactatcattctcttgctttcatgttttcaccttatgaattcaaagaacaagtga

SEQ ID NO: 3515 - DNA, 200 bp, Lawsonia intracellularis
cacttcatcagcaaagaataaaagagctctttaaaattaccccccatgtattccgtaatactgaacttatttacacaaatgaactagcaaaatgtattgaaaacatggggtacataggtattttggctgaaggagctgatcatattcttaactggagaagtcctaattatgtttatcgtcctctgggctgtaataatctt

SEQ ID NO: 3516 - DNA, 200 bp, Lawsonia intracellularis
aaacttcttcttaaaaactatagactttctgatgatatagcattccgtttttcaaataaagactggataggatatccattaactgccgaacgctttacacaatggattaacgattcaggaggttcaaatgaaactattaatctctttatggattatgaaacctttggtgagcaccaatgggcagatacaggtatttttgc

SEQ ID NO: 3517 - DNA, 200 bp, Lawsonia intracellularis
ctttatggaagcactaccacattatttgctacaatcaaataatcaatttttaacacctacagaagttgcgactacattcacaccagttgcagagcttgacataccatatcctgtttcttgggcagatacagaaagagatctaacagcctggacaggtaatgagatgcaacaagatgctattgaacgtctttatcgtttag

SEQ ID NO: 3518 - DNA, 200 bp, Lawsonia intracellularis
aacctttagtaagggaatatggatgtgaacaaattcttaatacatggaaacgactacaaacatcagatcatttttactacatgtgcacaaaatggttttctgatggagatgttcataaatacttcaatccatacccatcaccatatgatgcctatattaattatatgaatatacttacagatcttgaaagcagaattacc

SEQ ID NO: 3519 - DNA, 200 bp, Lawsonia intracellularis
ctacaaccaaatagtaatacttattctaaccaacataccatgaaagcacattataacgatgtaactcctcttttatcacctacaacttgcttcaataatttacaaaacctataaggaatagttatgcagcaggcagttgaacaaacaacactttttgaagttagctgggaagtctgtaataaagtcggagggatttatac

SEQ ID NO: 3520 - DNA, 200 bp, Lawsonia intracellularis
agtagtaactaccaaagtccctcaagcaataaagacttttggagacaattattatcttattggacccaacttaggaaataatgcagattttcaagaaacagatgaaccttgctgggaaacattaagccaatcacttgctataagaagtcttcattgtcgttttggtcgttggaatattccaggaaatcctaaggttattc

SEQ ID NO: 3521 - DNA, 200 bp, Lawsonia intracellularis
tagtcaactttaaagatagatataaccaaaatcaattattatatgaattttggaatagatatggtgtcgactctatgacaggaggctgggactatattgaaccagttatgtttggttcagcttgtggcgaagttattaatatagcagtcaaaacacttgtagaacctgttggtggaacagctgttgctcattttcatgaa

SEQ ID NO: 3522 - DNA, 200 bp, Lawsonia intracellularis
tggatgtgtggtagtggattactcactattaaacaacttgctccagatgtaggaacagtttttaccacacatgcaactattcttggacgatcaatggctggtgcaggcattgatatttatgaaaatctctcacaaataaatccacaaagagaagctgctgcttataatataactgctaaacaatccatggaatctattac

SEQ ID NO: 3523 - DNA, 200 bp, Lawsonia intracellularis
tgctcgtgaggcagattacttcacaacagttagtgaaattacagctgatgaagcagaagcttttcttggacgtcgtcctgatattattacacccaatggattagatttacacatcatagctgactttagtaaggacacttctcttactacaacagcaagacaatccatccttagtcgagcttctcaatttattggtcaac

SEQ ID NO: 3524 - DNA, 200 bp, Lawsonia intracellularis
aacttcctaatgatacacgtattatgattatttctggtcgatacgagtttcataataaaggatttgatgtctttcttgatgcactaggaaatgtcgaacaagcattaagaaactcaaataaatatgttcttgcattatgtacagctattggaggacatactggtgtcacaaagtatgccctagagaatcatcttgaatca

SEQ ID NO: 3525 - DNA, 200 bp, Lawsonia intracellularis
aatatgattactcctcctatgccactccgtattgtaactcatcatgtttataatatagagcaagatcctattattacaaaatgtttgagattaggactcacaaatcatgaagaagaccatgtaaaaattatatttgtacctgcgcttcttaatggtcaagacggtttctttaatatgcaatatgaacaagtactgccagg

SEQ ID NO: 3526 - DNA, 200 bp, Lawsonia intracellularis
atgtgaccttggggtattcccatcatggtatgaaccatggggatatacacctcaagaaagtgctgctcatgccgttcctacagttacaactgatctttcaggttttggaatgtgggtacgtaaactccaagaaaataaccatgttacagatggtatttctgtcatacatcggctgcatatgccatatgacgatactgtta

SEQ ID NO: 3527 - DNA, 200 bp, Lawsonia intracellularis
atgcacttcaatctgttatactggaatatgcaacctgttcatcagaaaaacttatgcaacatcgaatagctgtgcgtaaagtctctgaagaatgttcatgggagaaatttttcccatattatattcaatcatatcattctgcacttgcaaaagccaacgagcgtatcagcatacatgaaccacaaaaacaaacaaacaca

SEQ ID NO: 3528 - DNA, 200 bp, Lawsonia intracellularis
cttgttattacaggtgtatcaaaaacacctaatcttagaatgcttacagcaattaaccaacttccacaaaaacttggacgactcagagaagttgtgaataatgtttggtggacctggcagcctgaagcagaaaccatcttcactttactgagcaaagaactatggaaacaatcaggccataacccactcaaaatgcttga

SEQ ID NO: 3529 - DNA, 200 bp, Lawsonia intracellularis
agatatatgccctgcagcccttatggcagcagaaaaaaatacagaaatacaggaatgttataacgaattgatcacaaaatttgatgaatatatgaagaataaacctcacacaactgatccttctatttcatcttaccatcctattgcatatttctctacagaatatggcttacatgagagcatcccgctctactctggtg

SEQ ID NO: 3530 - DNA, 200 bp, Lawsonia intracellularis
gattaggtatcctttctggcgatcatcttaaggcagctagtgacttaaacattcccatggttgctataggacttttatacaaaaatggctatttccaacaacgaatagatgctcaaggcaatcaaattgctatgtatcctgaaaataacttctctcttcttcctatttctcttgtaaaaacacttcaaggagatcctgtt

SEQ ID NO: 3531 - DNA, 200 bp, Lawsonia intracellularis
agaatagagctagatcttttcccaggaagacaactttttgcacaagtatggaaaatgcaagtaggtcatgtaccactctacttacttgacactgatattccacaaaatattctagacgatcgaagaattacagcacgactttatgaatcagatagagactgtagaatacgacaagaaattctattaggaatgggtggtgt

SEQ ID NO: 3532 - DNA, 200 bp, Lawsonia intracellularis
aagattattgaatctacttaagattatgccttctatctaccacatgaatgaagggcactctgcttttatgattttagaaagaattcgtaacctgatgctttggttcaatctaccattcaatacagctcaagaatgtgtacgtggtaatacagtatttactacacatacacctgttgatgctggtaatgaacgatttgatc

SEQ ID NO: 3533 - DNA, 200 bp, Lawsonia intracellularis
ctagtttaatggaaaaatatttttcagattatgcaaaatctgtcaaccttacatggaatgacttcatgagtcttggcagattttccacaaatgatagaaacatgtttgaaatgacactccttgctattcggaatgcaaataaagtaaatggagttagtagattacatagccaagtctctaaacatatgtgggctaataat

SEQ ID NO: 3534 - DNA, 200 bp, Lawsonia intracellularis
tggaaaggattacctgttcctgaaatacctattggatatgttacaaacggagtacatattgcatcttatgttggagaacatacacgaaaacttctcaaaaagtatgtgcatgaattatgggatagcctacccacatcccatgaggcatggaaaaatgttgcacaaattcctgatgaagaattatggaaagctaggttaga

SEQ ID NO: 3535 - DNA, 200 bp, Lawsonia intracellularis
acaaaagcagcctcttcttaatgtaataaaacatctggctatgtcatctaacctctcctataaaatctttgcagaagaacagcagagtattatacaacagctttctgaagatgtacttattattggatttgcaagacgctttgctccatataaaagagctaatcttattcttgctaaccctgacagattacaccatattc

SEQ ID NO: 3536 - DNA, 200 bp, Lawsonia intracellularis
tgaacaaccctcaaaaaccaacaattcttgtttttgctggtaaagcacatccagctgatcaacaagggattgatcttataaaacaagtaataaactatacaaaagatcctagattttatggtaaaatattctttatagaaaattataatcttgctattgcaaaaattcttctacaaggctgtgatgtttggcttaatact

SEQ ID NO: 3537 - DNA, 200 bp, Lawsonia intracellularis
ccacgtcggccatatgaagcatgtggtacaagtggtcaaaaagtaggtgctaatggtggacttaatcttagtattgctgatggatggtggtgtgaaggctacaacagtcataatggttggacaattggcaaagaaatcgtagacatattacctgaatccgagcaatgtgactatagtgatgcagaatccttatatagcct

SEQ ID NO: 3538 - DNA, 200 bp, Lawsonia intracellularis
tttagaagaatctgtacttccactatattttaaaaaggacacaaatagcttttctccttcatggatagcaatggtcaaaaatgctatgcaaacccttatccctgaatttaatgctgaaagaatgcttcatcaatatttagatgattattatcttccacttgcaaaaaatcaggtaacctttagaggtgataactttgcta

SEQ ID NO: 3539 - DNA, 200 bp, Lawsonia intracellularis
ttccaaaacaaattaccaaatggaaacaaggacttgaacaacgctttgctaccattaaaatacgtaatgtccaaattgaaggtttaacagaagatactgtgctttatggagaacctcttactattactgtaacgcttagtcctgaatcaatgaaagttgatgaacttctagttcaacttgttataggtcctggaaaagat

SEQ ID NO: 3540 - DNA, 200 bp, Lawsonia intracellularis
aatacatttacagaaatgccagatgtgttaacactcatggtatcacagcaatctggtaaagaggttacattctctggagtatataatattaaatataatggacctaatgtttatggaatacgtatcttacctacaatgccagggttactttcaccatatgaaacagggcttatcctttgggtataaaaagttcacataag

SEQ ID NO: 3541 - DNA, 200 bp, Lawsonia intracellularis
ataagaaggtatggtaattaccataccttcttatcttattataagtaataactatgtatttatactggttttttgacaatttctgttccaacaccttgatcagtaaataactcaagtaaaatggaatgttccaaccgaccatcaagaattaccactttttcgacaccttgttcaatagcttctatacaacattgtagttt

SEQ ID NO: 3542 - DNA, 200 bp, Lawsonia intracellularis
aggtatcataccaccaaaaacaataccatcactaaacagtttaggtgtatcctctaaataaatagattgaataagctttttattaagatctaagataccttctacatctgtaagtaaaagaagtcttgtggcttttaaagcacctgcaatagctcctgctacttcatcagcattaatattatatgtttgtttattatctg

SEQ ID NO: 3543 - DNA, 200 bp, Lawsonia intracellularis
ttccaacaggagcaataattggaatgaagcctttttcaatcaatgtatatagcaatgatgtttcaatatgaacaactcgtccaacattcccaagattgataatttcaggaggttgattttcttttgtaagaattaaatcatttttttcagcaagaatgaatgctccatcttttccagaaagtccaacagctttagctcct

SEQ ID NO: 3544 - DNA, 200 bp, Lawsonia intracellularis
gcttgatttacttggtttacaatttctttattaacagaaccagctaataccatttcaacaacatccatggtggctttgtctgttacacgtaatccttcacgaaattcagactgaatatttaatctagataacatattgccaatctgtggtcctcctccatgaactacaataggatgaatacctacaagattaagtaatgc

SEQ ID NO: 3545 - DNA, 200 bp, Lawsonia intracellularis
tatactttgagcaaaggattgtttcagcaatgtatctttcattgcatgaccgccatactttatgacaatcacttttccttgaaatttttgtaaatacggtaaactttcaatcaacatatgagatcgaagtcttgctttctccatatccaccttatattcactccatagtattaaagaataaatctgcttaactctgtatt

SEQ ID NO: 3546 - DNA, 200 bp, Lawsonia intracellularis
agcacgtatatcttcaagatatgaaacgacatactcttttgttacttccaatgtagttccaaacttttctggtgcatcaaaagagatgtctgcaagaattttttccataattgtatgtaaacgacgggcaccaatattttccgtttgtgtattcacatcttcagcaaatgctgaaatttcttttaacccatcatctgtaa

SEQ ID NO: 3547 - DNA, 200 bp, Lawsonia intracellularis
aaacaatttttacaccttctgtttctaataatgcttcatattgtcttgttaaagcattatctggctcagttaatatacgataaaattcgtttttacctaatgcttcaagttctgctcttaatgggaaacgaccctggagctcaggaataagatcagaaggttttgataaatgaaatgctccagcagcaataaatagaata

SEQ ID NO: 3548 - DNA, 200 bp, Lawsonia intracellularis
tgatctgtcttaatcagaccatatttagtatttactgcacttccttcgacaataggaagcaagtcacgttgcacaccttctctagaaatatcagaagagcgatgctgtgatgcacttgcaagcttgtcaatttcatctataaaaacaatacccatttgctctacgcgttcccgtgctaaatctgtaagtttatcattatc

SEQ ID NO: 3549 - DNA, 200 bp, Lawsonia intracellularis
aacaagtcggttagactcttctcctacaaggtgttcccaagcagcacttactttcatttttcgacgatgtgttttttgtggaaagatacgactaaatgcatctttcatctgattacctatttgttccattccaggaacgtttaaaataccaataggctgtgtttgttcttgcacttcaatatcgacttctcgatctttaa

SEQ ID NO: 3550 - DNA, 200 bp, Lawsonia intracellularis
gatgaccttgtcgaaaaagacttcttaatttttcacgtgtagcatcacgattttctcctataggaagtaacaaatctaaaagtctttcttctgccaaaacttctgctcgttcacgtactttttctgcctcttctttcctgacaagattaatggatatctccataagatcacgaatcatagactccacatcacgtccaaca

SEQ ID NO: 3551 - DNA, 200 bp, Lawsonia intracellularis
tagcctacttcagtatacttggtagcctcaactttaataaaaggagcatgacataacttagcaagtcttcgggcaatttctgtttttccaacacctgtaggtcctatcataataatattacgtggagctacctcgtctcgtaatccttcttgtaactgttgccttctccatcggtttcttacagcaatagctaccatgcg

SEQ ID NO: 3552 - DNA, 200 bp, Lawsonia intracellularis
ttttgcttgctcttgtcctataatatatttatcaagttcaacaacaatttcacgtggtgtaagttcattcatttgtgttccttccctagtacgtagttaaatttatacaatacatatgaacatcaagttgtttataatccataattcaaaggaacattacctacctaaatatgctttttgaatctctggattacctaata

SEQ ID NO: 3553 - DNA, 200 bp, Lawsonia intracellularis
agttcttagcagtatcttctattactattctgcctaactctaatacatacccacgatttgctagttttagtgctgctcgagcattttgctcaacaataagaatagtaactccaagtttattaatatgctgtactgcattaaaaattgatttaacaataagaggtgctaatcctaaagatggctcatcaagtagaagcaag

SEQ ID NO: 3554 - DNA, 200 bp, Lawsonia intracellularis
cgaggctgacccataagggctctaccaatagcaagcatttgttgttctccaccagaaagcgtaccagccaactgctcttttctctcatataatctagggaaaagttcaaaaatccagtctaatgtttttcttatcaaatttttatcttgaatagtaaaagcaccaagttgtaaattttcaaagacagtcaaaacaccaaa

SEQ ID NO: 3555 - DNA, 200 bp, Lawsonia intracellularis
aacacgtctaccttctggagattgacaaacaccttgtcgtgtaatcatgtaactaggtaatgaagagagatccttacctctaaaaacaattgaaccctttgttacttttacaatcccactaatagaaagtaatgtcgttgtcttaccagctccatttgcacccaaaatacttacaatttctccctcatttgcataaagag

SEQ ID NO: 3556 - DNA, 200 bp, Lawsonia intracellularis
atacaccatgtaaaacctcttctgcaccatatcttgcgtgtaaatcatttacttctagaaacattaatatattccttaaataaacaataagataaaggcaaaatcatacattagatctagtcatcttgaccaagatatgcttggataactctaggatctctttgtatattctctggatgaccagaagcaattaatgttcc

SEQ ID NO: 3557 - DNA, 200 bp, Lawsonia intracellularis
agactcaagcactaaaagtctttcacatacattcattacaagatgcatatcatgttctataagaagtatagtaatacctctttctttaattgcatgtatgagcttaattaaaacatttgtttctggatcattcatgctcccagcaggttcatcaagaataataagttttgggtcagaagctagggccctagctatctcta

SEQ ID NO: 3558 - DNA, 200 bp, Lawsonia intracellularis
gtaaccgctgattaccataggaaagactttttgcctgatctatagaataggaagctaacccaacaaattcaagttcacttatagcacgctcaatagctgcttgttcttcctgacgttgtgaagaaaaacgaaacatacagctaaagaaacctgattgcattctacaatgcctaccaataagaacattttcaataacagaa

SEQ ID NO: 3559 - DNA, 200 bp, Lawsonia intracellularis
agatatgggaaaaggcgtatagattgaaatgttcgagcaataccaagatttacaatagcataaggcttcattccttgaatagattgtcctgcaaaacaaatctctcccttattaggaatagagtttcctgtaattaaattaaatatagttgtcttaccagctccatttggccctataagacctataatacttccctgttt

SEQ ID NO: 3560 - DNA, 200 bp, Lawsonia intracellularis
aatttcaaaagaaacattgtttacagctatcaacccgccaaaaaattttgttacgttattaagagaaagaagtgtcatatagtattcctaattctgtctaggagcaataggtgatccaaaatcagaatgtttcttatgtaaaagatttcgaatattatagacacgaggtaatggtggtaataaaccttgaggtctgacaa

SEQ ID NO: 3561 - DNA, 200 bp, Lawsonia intracellularis
tcatcataatcatcattgctaagccaaaaataagcattctcgcatctgcaaggctccgaaatatttctggcaatgcaataacaaaacatgttcctaaaatcacacccaattgacttccacctgataaaataacaataacaaaaataatgacagattcccaaatagtaaatgaagttggagaaataacagtcatcttactt

SEQ ID NO: 3562 - DNA, 200 bp, Lawsonia intracellularis
gcaaaaaggttcccagctattcctgcccaaaatgcaccaacaacaaatgctaaccacttatagtgaataatattaattccagaaccttcagctgctacctcatcttcttttatactattaaaagctctaccatatcgggatgaaaataaccaagaaaaaaggagcatagtcaaaagaacaataccccatattagataata

SEQ ID NO: 3563 - DNA, 200 bp, Lawsonia intracellularis
aaactgagtagttgtacgaataactatatcaccaatagtaggacgagatataccaaaaattccattagcaccaccagtaataccacaaatatcattagtaagtgcaattcttacaatttctacaataccaatactaacaataagaagataatctcctcttaaggaaagaatgggccgtactataataagagcaaaaaaag

SEQ ID NO: 3564 - DNA, 200 bp, Lawsonia intracellularis
ctgtagtaaaaccagctaaaggtaatagccaaagaatagggatctggtagtatgtattacaaatagcagtaaagtaagctccaacagcataaaatgctgagtgccccatatgaaaaatccctgtttggccaagaataacattaagagataacgcaagtaaaacataaagaccaacatttgaagcaacatcaatccaataa

SEQ ID NO: 3565 - DNA, 200 bp, Lawsonia intracellularis
ttattaaggaaaagtggtaagatagcaatacaaactcctagtaatagagagcaatatcgtcttattctactcataatttgtctgctaccctctcaccaagaagacctgttggtcgaacaaccaaaatgataatcaaaataaaaaaagcaacagcatctttccacccaatagaaagataagaggcagctaatgtttcaact

SEQ ID NO: 3566 - DNA, 200 bp, Lawsonia intracellularis
actcctaataataaccctcctaacattgctcctggaatatttcctattcctcctaaaatagctgcagtgaatgcctttaaaccatatagccagcccatagtaaaagaaatttggccataatacatacctaccattacacctgcaataccgccaaggccagcaccaataaaaaaaacaagagaaataattttgtttacatt

SEQ ID NO: 3567 - DNA, 200 bp, Lawsonia intracellularis
aatacccataagccgtgcagtaatttgatcaattgcaacagcttttatagccattcctatagatgtcttattaacaaaaaaatataaagttaccatgaggaaaaatgaaatagaaataataataagtcgcatgaaagaaatatgtaccccaaaaatatctaaactaagtgaagggaaaaatgtttctggatatacataaa

SEQ ID NO: 3568 - DNA, 200 bp, Lawsonia intracellularis
aatttccaccataaataagcataatagcattctgtaaaaaaatagatgcacctaaagctgaaacaacagcagataatctatttgcttttcttagaggacggtaagctgtacgttcaagaagaacgcccaaaaatgcaactataacaaatatagtaaacatcactaaaccaatagcaataggttctgcaagtgttgataaa

SEQ ID NO: 3569 - DNA, 200 bp, Lawsonia intracellularis
cctaaggaaaataaaagagtaaatcctatgtatgcaccaatggtaaaaagttctccatgtgcaaagttaatcaatttaagcacgccatataccatggtataaccaagagcaactagggcataaattccccctattgctactccattaataatctgttgaaaaaattcaatcatatagtagagcttattgacaaaaactaa

SEQ ID NO: 3570 - DNA, 200 bp, Lawsonia intracellularis
aaagagttagttagactattgcattatttttcaagaataaatgttccctgttcatcaacataatatactttataaaaattccctatacgatctccctgctcatcaaaagaaattggccctgtcaacccaggaaaatcctttagtgtatgttttaaataaaatgcaatagatttaggagaatcttttccttgctttaaagc

SEQ ID NO: 3571 - DNA, 200 bp, Lawsonia intracellularis
ttcaataatcacattaaatgcttcaccagcaaaaataggccaaatagcgctaggtaacttatgatattgttttttgtattccataaaaaatgcttttgcttcaggtgtattaaagtcatatgctgtaggaggactcaaaaaaaagtatcctttagcagcttgttttcctgcaattttaacaagatctgtattatttgttg

SEQ ID NO: 3572 - DNA, 200 bp, Lawsonia intracellularis
catctccacccataattggaacagaccagttcatctctgacttttgacggagtaataaaccagcctcagggaaataacctgtgaaaaaaatcagatcaggatttgttgtttggattttagttaatatagcagtataatcctgttcacctggtgtaagcgcatcaaaaaatacaacagagctaccttttttttcaagttct

SEQ ID NO: 3573 - DNA, 200 bp, Lawsonia intracellularis
ctccttgtctcttgtgctaacccttttgcataagaagaattatcgtgtagtattgctatagacttatatcctttttgactaatgacatctgcggctactataccttgatcactatcacgagggcttgtacgaaaaaatagtggtaatcctttatctgttaacctattacttgtagaacctgtagcaatttgtacaattcc

SEQ ID NO: 3574 - DNA, 200 bp, Lawsonia intracellularis
agcttcattaataatattttgtgttgcctctgtaatagatgaaccataagtaccaataattgctaccacaccagaggaaacaagtttttgagcagctaatgctgctgttcgaggatcacttgcatcatcctcaataataagctcaaccctttttccattaactccacctaaattattaacattttctgctaataatttta

SEQ ID NO: 3575 - DNA, 200 bp, Lawsonia intracellularis
caatattttgcatctcttgaccttcatttgcccactttcctgtaagtggacacattaagcctatacgaatcacttcctcacaaaaagcatttcctacaaatatattaacacatatagctagtaataatattctcaaccatttcttcatgcatactccaactatatacatagcttataacaacaatacactaaaaaataag

SEQ ID NO: 3576 - DNA, 200 bp, Lawsonia intracellularis
acatactaaatataatacatattcatattttttaatacctatattagtctacctgatatatcaaccaaaaacatggctatatatgacacagacaccaaaataatagttacattttttaacaaactatcctagcattatgtttttataataaaaatattagaaatgataaaagagtatagtttatactcttgccttaccta

SEQ ID NO: 3577 - DNA, 200 bp, Lawsonia intracellularis
aaaatccaacatatactcttctaatatatgtttgttccctataatcaatctatcgaattattaataatagaaggatatttttaactcatcctcattatggatagaggtatcccatgctgattcattgtccacagtgtcatttttatcgtgaacttaatacttcccaaattccagataatgctgttatggcaacatgccca

SEQ ID NO: 3578 - DNA, 200 bp, Lawsonia intracellularis
aagtgtcaaactcgatttcgttttcgtaatcttgatagtgaatatgttgatccaagttcatctaacactattcacctattacagcaagctgagtcaaaaacatttactaatccacctacaaacaatactagtatatctcattctgatacagagtgtttaaaaaactcctctagtgaatacaatcaacaaaacaactataa

SEQ ID NO: 3579 - DNA, 200 bp, Lawsonia intracellularis
aaatgtacttgaaaaactaaaaaaatatacattaactaatcaaaccaggcagcctacagatggttatgtagatcttattccatgggaacatccagaaaaatttgattttttttctagtttttaccaaacaatagtaagagttatgtttaaccctgcaacattttttggtaatataagtaatgcaacaagttcattattaa

SEQ ID NO: 3580 - DNA, 200 bp, Lawsonia intracellularis
gacctttatttttttatatcttagtaagactttttcagacacttatggatggaatgtggtttatggtgagctttcaagctcttgaaccatcaataacagagtcatctctccatgatttattaagctccattgcacaagaaatgacaattccaatgacacttataatgacacctgttacacttgctcttcaacttggaatc

SEQ ID NO: 3581 - DNA, 200 bp, Lawsonia intracellularis
tatgttttattgttttatcttatgattagattcattcaacctgaacaaacatattttcacacaatattccgtgttattgcttatagtgccgctccaactattgtttgtattattcctattattggctctcttgtaggtagtatttggttttctatatcctgctttattggttgcaaatatgcattaaaactttcatggac

SEQ ID NO: 3582 - DNA, 200 bp, Lawsonia intracellularis
taaaactgccttagctcttatacctctttaccttatagcaatggctattgggcttcaaggagcaaaacagtttatacacattgctggataaacacataatatctaaaactgacagaatctatactacctagttaagatataagactatttattatactgtaattcttcaaacattctttctattagatatacctgtgatt

SEQ ID NO: 3583 - DNA, 200 bp, Lawsonia intracellularis
aatacttttaattattactatagcctagtatagcagtactttttatttataacatatttttatattatttctctatataacaatagcataaatataccctataggctatactctttatattaattaactgttccatcatacctatggagttagctatgcgtatagttgtattactatgtgttatacagttatgtatcctt

SEQ ID NO: 3584 - DNA, 200 bp, Lawsonia intracellularis
ggaacagcttgtgaccttacatctaccggaaaagctttaagaaatactatacatataaactcatatggacaagctgaagttattcttgataactggataaatactagtcaaattcaagtatatgtctatccccaatctcctccagttgaacctacaaaagttctttttgttccatttagagtaacacaacaaatggaaaa

SEQ ID NO: 3585 - DNA, 200 bp, Lawsonia intracellularis
ttttttgactgttggtaacaatatttcacgtattatttggcaaaactggttacagaatagcatattttctacacttgaatttctacagaatggaacagcatttcgtccagatgtatccctcactattgctaaacaaaaaggtgctaacttagtggtaggtggatatattacagattttattgatggaggcttaagtggtg

SEQ ID NO: 3586 - DNA, 200 bp, Lawsonia intracellularis
atacacgtgtttctattgcaatagaaatttatgacgtatcaacaggtaatttaatatggtcattatcacaagcaggtagtatacaagcagctagtgtaaatgattttattatctttgctacaaaaacccgtatgccaacaaaccctagtgctgcagtcatcaaccttcttgcagaggatatgggtaaaaaaattaaagag

SEQ ID NO: 3587 - DNA, 200 bp, Lawsonia intracellularis
tggacaaacccttcatttcaagaagaaacatggcttatgccagaaccattagcattttgataaaaacactttccttcatatagtacagttactacttatagaaacctatagcatatagtaacaaaaagttatgatattgtttttatctacaatttattatatgctaaaaacattaatttaatatattaaaaatattaatt

SEQ ID NO: 3588 - DNA, 200 bp, Lawsonia intracellularis
catgctaaaggaacataatggaagaatgctctcctattgaccttctctctactaaagaaacatggcgactatttagaattatttctgagacagtcgacggctttgaagcaatgagtaaagcaggcccttgtgtatctatctttggatcagcacgggcaaaacctgataatcctctgtataaagaaacagaagccatttcc

SEQ ID NO: 3589 - DNA, 200 bp, Lawsonia intracellularis
aagcttcttgtttctgcaggttttggaattattactggtggcggaccaggtttaatggaagcagcaaataaagcagcttttgaagctggtggacgctccattggattacatattcatctccctcatgaagaaggatgtaataactatcttacaatacgtacagaatatagatatttttttataagaaagcttatgtttgt

SEQ ID NO: 3590 - DNA, 200 bp, Lawsonia intracellularis
gaagtacgctcaagcctatgtcgtaatgccaggtggaatgggtactatagacgaattttcagaagcatttgttcttacgcaaacaaagcgtatccatcctttccctattatactctataatagccaattttggaatggattagtcgattggatgcgacaaacaatgtctaaagaaggttttattgaaccatcagagattg

SEQ ID NO: 3591 - DNA, 200 bp, Lawsonia intracellularis
atgctcttcttaatatctgtgatacacctgaagaagttctcaaaattattcaagaaaaagttcccactgcaataacacataaaaaaaataaacataagcagttacattcatatccttaatatctaatattccttaattgaacttaatacaacttaagatatagttagttatttttcatcaaataagaatggattataaac

SEQ ID NO: 3592 - DNA, 200 bp, Lawsonia intracellularis
cagaaaaaataatgtgttgggggcctataccaacaccaccattaggctggacttgggacaacttaatggatgaagcacttattgaagcaaatcaatgtacaaaaaaaaatgaagtacctgttggagccattattgttcataaaaatggtaaaattattggtaaaggtcataatgctccaataacaacttcagatccaaca

SEQ ID NO: 3593 - DNA, 200 bp, Lawsonia intracellularis
gcccatgcagaaatacttgcattaagaaccgcaggagcagtccaacaaaactatagattacaagattgttttctaattgttactcttgaaccatgtttaatgtgtgtaggtgctattatacaagctaggattgatggtattgtatatggggcagcagaactaaatacaggaagtattacttcctgtattgctggttttga

SEQ ID NO: 3594 - DNA, 200 bp, Lawsonia intracellularis
tttaccttttaataactataagccatggcatatgggaggaataaaagcaacacagtgctctcagttattgcataacttcttttataaattacgaaaataaaattatcagttaaaatttaaggatacctaccctaacgtttaaaatatcttgtttgtacttaaccatctgttgtgattacctatataatatgtaatacata

SEQ ID NO: 3595 - DNA, 200 bp, Lawsonia intracellularis
aaaagtagataaacactatagttttattttttccaactagggtgttactaaaaaaatatttttttctttgaaaagaagataatacttttaaaacttttattttataaatgaggatattgtggcgaaatcagctgaagaaattactattgaatatgaagaggcaggtcaaattcttgtcaaagaacttgataaagtcattc

SEQ ID NO: 3596 - DNA, 200 bp, Lawsonia intracellularis
tttctaaaggagcatggacaactatactctttcgatatcaagagtttgatccagaaactggtggatatgggccagaaaagtatagtattcgtcgttatcaaaaagttgcaggcgaatatcgacaaaaatctaagttcaatatatcaagcatagaacaagcaaaaaaaattattgaagcactcacccattggatctctgaa

SEQ ID NO: 3597 - DNA, 200 bp, Lawsonia intracellularis
tcataacaataactcaatcaaaaatgataaagggctatattttccaatatagacataataaactagaacaaaaacataagtaactttaatcaacaaatagatattctatttattaaaaacttataatacattctcttaacacagcataaaaagcagattaatatattatagttttaagcttataaataaaaatatggatg

SEQ ID NO: 3598 - DNA, 200 bp, Lawsonia intracellularis
tattatgtggaacgctgaaaaagttaagcagcttgctgagtggtatgtatcaccacaaggttcctttgcattagaacaagaatataaactattccaaaatctgatatctatatggccaagacgtgactataccttacttaatattggttgtggagttggtgcatttcttgaaatgttctgggattatggatttgatgtta

SEQ ID NO: 3599 - DNA, 200 bp, Lawsonia intracellularis
ctggacttgataataatttagaagtattagaactttcttctaatcgactaaaaaatcgtgcagaattccaattaggtgccttagatgatcttccatttgaagatgaaagttttaactacgcatcattagtgactattttagaatatgttgaagatccaaaaaaaattttagcagaagcatttcgtgttgcatctgatggt

SEQ ID NO: 3600 - DNA, 200 bp, Lawsonia intracellularis
attattgttggattcacaaataaatggtctataaatcatatcattaatagtacattacagctgcttcataaaaaaccaaaaaaagacagtcaatgggtgagtccttggcaacttattcgtctaacaaagcagctttatcctgaatgtagaatttattgtcgctctactttactaggtcctaagcgtacttgggatgtaac

SEQ ID NO: 3601 - DNA, 200 bp, Lawsonia intracellularis
ctcttcatggtctaaacttaaccgtattattctttcttttcctatagggacatacgttggaatgcgtattgaaaaacgcccaaagcccacactgactcctttacttctcaaagcaaaagaacaagcagtaaatgtatataatgcattaagtcctgaagcaacaagcactattcaacataatagaactaacaaataataat

SEQ ID NO: 3602 - DNA, 200 bp, Lawsonia intracellularis
aactaaaaattcattgcacctatctagtatttttcttttactgtatctaactactttatctattaattagattaataattaaaaattaggtgtatcaccaacggcaatagaaagctctctgaataaccgtaaactttcttcagcttcagttgcctccagtttatgtatagcaaatccagcatgcacaataatataatctc

SEQ ID NO: 3603 - DNA, 200 bp, Lawsonia intracellularis
caacagttactggttctggaagtaacatacctgaaacagtcaatattgttgtactatcgccaaccgtagcacgaataatatcattatccaacagttcaataacttttacagggatagcatgacacatcaacttatcctttattctatattattttaaacaaacttttaccctcttgtatcacataataattagtaactat

SEQ ID NO: 3604 - DNA, 200 bp, Lawsonia intracellularis
atggaatacaataactatatctatgaaaatcattttatccttttcttatatcctaacatattatttataaaattgatagataaaaatagtattaatatacctctaacaagctcaaactataaaaaagaatactccttacaaaagtaaagagtattctttatacttgttataagtttaataaataaggaagagttagttgc

SEQ ID NO: 3605 - DNA, 200 bp, Lawsonia intracellularis
tatcttcagttaaagacaatgttttaaaaaacgtttgtccatttctttgtaattgtaacataataacccctttcttcttagcatctccacaaataatatttgcaaggtcatcagccgattgaagaggttttaagttagcagaaaggattatatcttgctctctgataccagcttctgacgctggcttattaggctcaacg

SEQ ID NO: 3606 - DNA, 200 bp, Lawsonia intracellularis
cttacaactaacaagcctataccaagcttaacatcaaaagatttagactcttcttgtgttaaaggacgtacagataatccaagagcacctggtaaagattctggtgagctttgtttttgacttgaagttgtcttacgctctcctagtgtaatggatatatctttactctttccatcacgccaaacttttaatttcacaac

SEQ ID NO: 3607 - DNA, 200 bp, Lawsonia intracellularis
agaaaaaggaggtttagtagcaatagcttttaacaatgagcttgcactatcaatttgtttaccatcagcttgtgttacaatatcgccaactttaagaccagccttatcagcaggatctccaggaacaacagaacctacaagcgcaccttttgcctgagataatccaagagctttagctgtattagtatctacatcctgaa

SEQ ID NO: 3608 - DNA, 200 bp, Lawsonia intracellularis
ttgttacacctatccaacctctacttacctttttatttgtctttaactgctctataatacgatctgccatactacttgggatagcgaaaccaataccttgcccacttgccataatagctgtgttaatgcctacaacttgtcctgacatattgattaatggaccaccactattcccaggattgatagatgcatcagtttgt

SEQ ID NO: 3609 - DNA, 200 bp, Lawsonia intracellularis
aaaaagttatcaaatggtccagcatgaatatcacgtcctttagcacttaatatacctgctgtaactgtatggcctaacccaaaaggattaccaatagctagcacccattcaccaacttccatagtatctgaatttccaaatataagataaggtaatgagtctttacttttaacttttaataaagcaagatctgtttcttc

SEQ ID NO: 3610 - DNA, 200 bp, Lawsonia intracellularis
atctctacctatcacttctgcaggtagtgattcttctttgcctgaggtaccttcaagatttactctaacagaatctgctccttctatcacatgattattggtaacaatatatccatctgaagaaatgataaaaccagttcctaatgaacgttgtttatgtatctgactatcaggccctttaggttcaaattgttcaaaaa

SEQ ID NO: 3611 - DNA, 200 bp, Lawsonia intracellularis
agcgttcaaaacctgggggaagaccacgaaacatttccatagggaactctgtacgaccacgaggaatttttttttctgtactaatattgacaacagctttactagcatcttttacaaggggtacaaagtttggtaaggcactttctgcaattgttggaaccacagttataataaacataagagttatgcatattatcacc

SEQ ID NO: 3612 - DNA, 200 bp, Lawsonia intracellularis
tttaacttacaaaacatataactctccttaaaactatcaaccttgaataattagggattaaaaataagataaacgtatattataaatctagctcttatgaaatattatcaaggatactaacttgcctcaatatttgagtatataaatataacttatgataatgataacaaaaaatatgtaacaaactccatttttataat

SEQ ID NO: 3613 - DNA, 200 bp, Lawsonia intracellularis
cagctacataaaaatggttaaaaaaattgttttaataaatcctcaccacgttcaatagtattcacctcattatctttactatcaaaatattctggaactgtacctacataaaaaggtaatacaacactattggtactattagcagttgctctattccctgtctgagtatctattgaagcaaaagtaatcccatcaggaac

SEQ ID NO: 3614 - DNA, 200 bp, Lawsonia intracellularis
aggaaagtcactttcaggatattttttcaatactacttttgaatattctgtaaaaataggaagagcagcaacagcacctgtgccatctttacctaatgtctgtggatgatcattaccaacataaacacctgtaacaagatagggtgtaaatccaataaaccatgcatcatgctccccatttgtagttcctgtctttcctg

SEQ ID NO: 3615 - DNA, 200 bp, Lawsonia intracellularis
ctagaggacgctcaagtacttttgcttttcttgctgtaccaatattaacaacattttttaatagtgaagccataatatacgcattctgtggtgaaataacaggatgttgttctatttcctggcggtaaataacagtattattagaatctttaatagaaagaataaaccgtggcgtggctaagttaccaccatttgcaaat

SEQ ID NO: 3616 - DNA, 200 bp, Lawsonia intracellularis
gctgtataggcatttacaagacgaataggagttacttcaactgcacctaaactaatagaaaaaaattcagggaaattaccattaaatcctaaagccttagctctttcaataacagcaggtaatcctatagactgtgcaattcttactgtacataaatttcttgaaagtgcaagagcattgctaaataacattggtccttt

SEQ ID NO: 3617 - DNA, 200 bp, Lawsonia intracellularis
aaaatttttttcgtaattacctggtctccaaatatccccactttccataaattctactataggtgcatcaagcaccatagttgcagatgtataatcatgatcaagtgctgcagagtatacaattggcttaaatgcagaacctggttgcctcattgcctgtacagctctattaaattggctctttccaaactcataaccac

SEQ ID NO: 3618 - DNA, 200 bp, Lawsonia intracellularis
caatcatagctatcacatcgcctgtatttggctctatagaaattaatgctccttggatttgtggtaactgttgaagagctaaaggaataggtttagaagtatctagtgttttagaactatacctatgtgtagagtctgggccaactccagatacccatataatatctccaggatttaaaacactacgtgcatctttgata

SEQ ID NO: 3619 - DNA, 200 bp, Lawsonia intracellularis
ggagcacaataagctgatcgaacttctggattaggtttacgtgcccaacccatagtctctacactaacaaaccctttataaatgctactaaggaatacttctgcaccttcttgactaactttactaacaattgctttagcccatgcaccaccatcaagtttttcaggtgtaaatgtagcattttctaggtaatgctgaat

SEQ ID NO: 3620 - DNA, 200 bp, Lawsonia intracellularis
cattgttgaagaaatgtgctcaataggtcctttccaaccttgtcgtttactaaaattttcaagtccatttcttaaaacatcatatgccacaagttgtgcctgaggatccattgctgtctggatagtaaacccaagttcataaagtgcatcttctccatataaagggagcacaattccatactgagaaatattttctttac

SEQ ID NO: 3621 - DNA, 200 bp, Lawsonia intracellularis
taagaaaggaaacaagctgcttacggacttcttccatataccaacttgattcagctcctaacccttctttcattgaagaaaaatatagtggttcttgaagagcctcctcatattcagcctgggtaatccaaccaacatcatgtagcctacgaagagcataacgttgtctaatttttgcagcctcaggatctttataggga

SEQ ID NO: 3622 - DNA, 200 bp, Lawsonia intracellularis
ttataccgagaaggtgcttgtggaagtcctgcaagaagagcacattcagctaatgaaagatctttagcatgcttagcaaaataagtccttgcggctgcctcaaccccataagaatgagcacctaaaaatgtctgatttaagtatatagttaaaatttcatctttagaaagatatttctctagacggtaggcaagaattgc

SEQ ID NO: 3623 - DNA, 200 bp, Lawsonia intracellularis
ctcttttatcttacgctcataacttctttcagggcttaacaaaagacgtttaatgacttgttgagtaatcgtacttccaccttggcgtgttgtccctgattgaagatttattaaaaaagcccggataatagcaagcggattaacaccttcatgttcataaaactcagcatcttctgcagctaaaaatgccttaggcaaaa

SEQ ID NO: 3624 - DNA, 200 bp, Lawsonia intracellularis
aaggagacatttcgcttaatgggataagaaaacgcttctctcgatatatatacccaataagtgttccatctctagcaagaactgttgttactaaagctggtctatagtcattaagctttgtaatattaggaagatctctactaacccaaaaataaagacctattagtcctataatagatagtaaaataataccaaaacaa

SEQ ID NO: 3625 - DNA, 200 bp, Lawsonia intracellularis
aaaataacaatattcagaaaaaactttttcatgtcaaagctgataacctgtttcatccttgacgtaaagaaaaagtagtaacatatcaaaataaataattataagttgaaatactattaatatataatacatactaagattacaatagattaaaaaatacaaaattaacaataaaatacatattaacgctttagttcaag

SEQ ID NO: 3626 - DNA, 200 bp, Lawsonia intracellularis
tgctttttgtagcattgtgtctgctgttgtaacagatttactattcatctgaaaaccacgttgaataataatcatattaaccatttctctgctcatgtctacgttagaagtctcaagttgattcacactaagttttccatagttagatgttcctggcaatccaaactctggcccacctgagtcaagtgttgcggaataat

SEQ ID NO: 3627 - DNA, 200 bp, Lawsonia intracellularis
ggttattcccttctcgtcttaatccatcctcacttgtaaagcgtgctaaaggaatattataaaaatcaacaacctgactattactatacttaccttgtaatttcccttcagaggtaattgtgacatctactagatctccctgaggataaccatcttggctatatcttcttgttgaagatgatccatttcttgctgtagaa

SEQ ID NO: 3628 - DNA, 200 bp, Lawsonia intracellularis
ttaccgctggatgtttgtattggcatcattgatggcaatttcccaatatctgtacctatggcagcagcggatgctggagctcctgcccacatattctgttggcttttaattccaaagtctaatgttaaaggctgtattcctgcaccaacaaaatttgctgaaaactgtggtaaaccattgactaatggtgctggttgcca

SEQ ID NO: 3629 - DNA, 200 bp, Lawsonia intracellularis
tgcatttaaatcttttgttgcagagccagtaggagtaaaagctgtcatattttttaattcgccattacttgaaaatgtcatagttccagacattaagagacctgcactatctgttcctgatgcagcacttccatcttcactaggattcatagctacaaggtattcaaatgttttacttcctgttgaagagggtgctccat

SEQ ID NO: 3630 - DNA, 200 bp, Lawsonia intracellularis
caaaatatacagttatatcgtgagaatttccttgttgatcatatactctcataggttgtgcatatgagtagtttgatgtagaaataggaggtgttccatttcctttccagctctcaagaagtgcaaagtatggattagcttcactttgtgttttatctgtactatcaccaaggtttaccacagcgtttaatgctgtactt

SEQ ID NO: 3631 - DNA, 200 bp, Lawsonia intracellularis
gtttttgcaggagactttgctactgtaggatcattaaagtctaactgaattggttcaagggtttccttttttatgttaggattattagatattcttgagcccattaaagtaaatccgctaggatcatttaaaaaaccatcttgagtaaaacgaaaattccctgctcgtgtatagtgtactttatcctctaatgtaacctg

SEQ ID NO: 3632 - DNA, 200 bp, Lawsonia intracellularis
aaaaaaaccttttccaccaatagcaagatctgttacactattgccaggttcaaaagcaccctgtgtaaaaattgtgcgaacacttccaacctgtgctcccataccagcctggtttggcccctgacttccagtagaacctattgctaaatcttgactaaacaggtcttgaaacactacctgttgctgcttatacccaatgg

SEQ ID NO: 3633 - DNA, 200 bp, Lawsonia intracellularis
tatttgcgttagcaatattattggagacagtacccaaccctgtactatgggttttcatacctgttgcaccaataaacaaactccccatcatgataacatctcctaaaaatagtttcatgcggcaaaatgtacctacacatctctatataaagcagaagccatgccaagaaatttttgcctattatatacttatctataac

SEQ ID NO: 3634 - DNA, 200 bp, Lawsonia intracellularis
tttttgtaataaaagatttatttttaacttgtttaccaactatctctactttaacaatgatacagaaaatacacttattattagtagtaacaaggctaataaccaagtaaaaaatcaaataaaatttttataaaactttatgaaaggtatgataagtatctacttgcgaactgtatatataatacgttattaacacgcag

SEQ ID NO: 3635 - DNA, 200 bp, Lawsonia intracellularis
ttaaaaatatattgaattattctttcattcttaataactcgttaggtatcttactatgcaagttgtaacaaacacagacctcaaagaatttcctctctatagtcgtggtaaagtccgtgatatttactctattgatcaaaatacccttcttattataacaacagatagaatgtctgcttttgatgttattttacaagaac

SEQ ID NO: 3636 - DNA, 200 bp, Lawsonia intracellularis
ctattccttataaaggtatcatcctcaaccaacttactctattttggatgaaaaaatttcaacaccttgttccaaatcatataatagaaagcaatgtagataactttcccagcaaccttgagccatataaaaatttacttgaaggacgatctgttttagtaaaaaaaacaacgccattgcctattgaatgtattgtccgt

SEQ ID NO: 3637 - DNA, 200 bp, Lawsonia intracellularis
gggtatatctctggatctggctggaaagattatcttacaactaattctatttgtggttatcctcttcctccaggactaaaagagtctgaaaaattagcaacagcactgtttacaccatcaacaaaagcagatttgggtcaacatgatgaaaatatttcaatagaaacaacagagcatctcttagggaaagatactactac

SEQ ID NO: 3638 - DNA, 200 bp, Lawsonia intracellularis
attagtagcttcactttctctccttatgtttaatgaagcttcggtttgggctgaagatcgtgggattatcattgctgacacaaaatttgaatttggtatacttgatggacaagtcatactaatagatgaagtactcacaccagactcatcacgtttttggcctacaaaaaactatataccaggtaaaagtcaaccaagtt

SEQ ID NO: 3639 - DNA, 200 bp, Lawsonia intracellularis
ttgataaacaatatctaagagactggcttgaaacacagctatggaataaaacatcccctgcccccaacctacctaaagatgttattcaaacaacctatgataaataccatgaagcctatactattttgacaggagaaaatattggtatataaatgcgttgcaaatataaaatactatgagtaagaggtccctatgctctt

SEQ ID NO: 3640 - DNA, 200 bp, Lawsonia intracellularis
aaaaaataaaaaatgccttattcttggaattgctaataacaaaagtattgcctatggaattgcttcatcttttaaagaacatggtgctaagttagcatttaactatgttaatgatgctatccaaaaacgtgtggaacctatttcacaggagttaaatggagattttatcttccaatgtgatgttagtaaagatgatgaaa

SEQ ID NO: 3641 - DNA, 200 bp, Lawsonia intracellularis
ttaaagaagctgtaaaactggttcaaaaagaatgggggcatattgatgtccttgttcattctgtagcttttgctaacagagaagatttaacaaaacgttttattgaaacatcacgtgatggttttcacttagccttagatatttctacctattctcttatcacattatgtcatgcatttgaaccactctttgtccatggc

SEQ ID NO: 3642 - DNA, 200 bp, Lawsonia intracellularis
tcttctgttcttacgatgacatattatggtgctcaaaaagtaattcctcattataatgtaatgggtgtagctaaagctgctcttgaatcttctgtacgatacttatctgtcgagttaggcgaaaaaaacatccgtattaatgctatcagtgcaggtcctattaaaacattagctgcctctggtatttctgacttcaaaaa

SEQ ID NO: 3643 - DNA, 200 bp, Lawsonia intracellularis
aatttttaatcatatagaagaacattcaccattaaaacgtaatgtaactatcgaagatgtaggtaaatctgctgtttttttagcttcagacctatcatcaggagtaacaggtgaaattctttttgttgatgctggctacaataatttaggtatttaacaatacatgctttatacaacatattgtgagttacaatagccat

SEQ ID NO: 3644 - DNA, 200 bp, Lawsonia intracellularis
aacacatttatattctatataataacagtagaataataatagaatattttttatgacctattgtatctatacaatagtaaatagattaatacatataagactatattctttttgagaacaacttaaaggagcggttatggctttagttacaaaagaagaagtacttcaataccatagtgaaccccgaccaggtaaacttg

SEQ ID NO: 3645 - DNA, 200 bp, Lawsonia intracellularis
aagtatttcctataaaaccatgtaaaacacaaaaagatctctctatggcttatagtcctggtgtagcagaagcctgcctagctatttctgaagataaagatacttcatttctatacacagataaagcaaacttagttggaatcatttctaatggttcagctgtattaggacttgggaatattggtccagaagctgcaaaa

SEQ ID NO: 3646 - DNA, 200 bp, Lawsonia intracellularis
cctgttatggaaggaaaagctatcctttttaaacaatttgctgatatagattgttatgatatcgaaattaaagcaacagagattgatcatatttgtgaagttattaaagcacttgaaccaacatttggtgcaattaaccttgaagatattaaatcaccagaatgctttgccattgaagagcgactaaaaaatgaaatgaa

SEQ ID NO: 3647 - DNA, 200 bp, Lawsonia intracellularis
tatccctatatttcatgatgatcaacatggaactgcaattatttcatctgcagcacttcttaatgcattagaaattgcaaacaagaaaattgaagatatccgtatggtcatttctggtgcaggagcagctgctattggatgtggacgtctgtttaaaattcttggtgttactcctgaaaatattgcaatgtttgactctg

SEQ ID NO: 3648 - DNA, 200 bp, Lawsonia intracellularis
aaggtcatattaatgtctctcgaacaaaccttaaccaagaaaaaaaagaatttgctacacaaaaaacatatacaaccattagtgaagcaatagatggtgcagactgctttattggttgctctgttcctggagtcatcactgaaagaatggttgaaacaatggctaaaacacctatcatttttgcatgtgcaaatcctgtt

SEQ ID NO: 3649 - DNA, 200 bp, Lawsonia intracellularis
cctgaaattggttacaatgaagtaaaatcaatacgacctgacgctatcatggctacaggacgctctgattttcctaatcaagtcaacaatgtccttggattcccttttatttttcgtggagcaatagatacatatgcaacaacaattaatacagaaatgaagattgctgcagcttatgccattgcagcacttgccaaaga

SEQ ID NO: 3650 - DNA, 200 bp, Lawsonia intracellularis
atctgtacctgaatccatatgtatggcttataatgttaaaaatcttaaatttggccctgactatatcattccaaaagctcttgatctacgtctacttgagtgggttgctccagctgtagctcaagctgctatagcatctggggttgcccgtaaagaacttgatattgccaattatgcattaaccctacataaacgtctat

SEQ ID NO: 3651 - DNA, 200 bp, Lawsonia intracellularis
ctgcagcacataagcgtcaagaattacttcttaactcatatggcttttatagttgaaaactaatataacccactctaactaatgtactaatgcttaatttattcattctatgtaatcaaagataaacaagttacttttttattgttataattatatcttgacaaagatatataaagacatctaaaaagttcctaacttaa

SEQ ID NO: 3652 - DNA, 200 bp, Lawsonia intracellularis
ccttgtctattcaattgagaatagaccataagtccataaggggattttttatcatgagaaaatttgaaacattattacttttatctccagaactttctccagatgcacgtgaagcactactagtaaagcttgttagtattattgaaaaaaataaaggacaatttactgtaaatcactggggtatgagagatcttgcttat

SEQ ID NO: 3653 - DNA, 200 bp, Lawsonia intracellularis
cctgtacaaaaacacatgcgtgggtattacgttcttcttgaatatacaacgtatccaaatattatagaagaattagagcgtattatacgcattactaatggaatatttaaattcatgacgattaaacttgaagaacacattgaagaaaaacaactcgaggaggtagtataatatgacttttaagaaaaaatttgctcctc

SEQ ID NO: 3654 - DNA, 200 bp, Lawsonia intracellularis
gtcgtaaattctgtcgtttttgttcagataaagagcttcctttaaattataaacgacctgatatattaagagactatattacagaacgaggaaaaattattgctcgtcgtattacaggaacttgtgcaaaacatcaacgtttgctttccacagagattaaacgtgctcgacaaatggcactacttttctttacatctagt

SEQ ID NO: 3655 - DNA, 200 bp, Lawsonia intracellularis
cactcttctgatgtaaaaagaaagagtaatatttaggagactaactatgaaagtcattttacgttctgatgtggaaaacttaggccgtcttggagatattgttacagtaaaatcaggatatgggcgaaactacttattaccccaaggtcttgctatgcttgtaacaccaggaaacatgaaagtatttgaattagaattta

SEQ ID NO: 3656 - DNA, 200 bp, Lawsonia intracellularis
aaaagctacaagaacgaatgaatgatatacgttctaaagcagatgaattagctaaacgtatttcaggattaattgttactgtactcatgcgtgctggtgataatgataaactttatggctctgttactacaagcattattggtcatgcactagcagaacaaggtatagatattgatcgacgccgtattttgcttgatgca

SEQ ID NO: 3657 - DNA, 200 bp, Lawsonia intracellularis
cctattcgtacacttggacaacatactgtacgcgtacggctacatgctgatgttattgcagaatttattgtaaatgtagcctctgaagaaaaactgtatgacgatactccagacagaaccgaaacagaagaatctacaaaagaactccaagaagaacacgcagagtaactcttcatctcttaatgtaaaaaataagaatg

SEQ ID NO: 3658 - DNA, 200 bp, Lawsonia intracellularis
attcttccgtaaatcatgtatcacatgatttgcttcgtagagttcctccgcataatgttgaggctgaacaagcagttcttggtggcatttttttacgtaatactgtttttcatacattaatagatattgttagagctgaagatttttatattcccagccatcaaattctttacacaactttttgtgagttatatagaaaa

SEQ ID NO: 3659 - DNA, 200 bp, Lawsonia intracellularis
agtgcacctattgacctagtctctgtagcagcttttctaaatgaccaagggttgcttgaacaagttggtggtgcttcctatttagcagaattagcacaaacagtagttagtggtgctaatgcagaatattatgcaacaatagtaagagataaatctcttcatcgtactcttattaatgcctgttcaacaattataacaaa

SEQ ID NO: 3660 - DNA, 200 bp, Lawsonia intracellularis
ctgttttgatccttcttgtaatgtagattcgcttcttgatgagtcagaacaaactattttttctatctcagagcgcacggtaggaaaagcatttaaaagctctaaagatcttatttctaatgtctttcaagaacttgaaaaacggtttgaacgtaaagagcaagttactggaatcacaacaggctataataggcttgata

SEQ ID NO: 3661 - DNA, 200 bp, Lawsonia intracellularis
aactcacagctggtctgcaaccttcagatcttattattgttgctgcacgtccatctatgggaaaaactgcctttagtttaaatatggctatgcgttctgctatccagcaaggtactcctgttgctatttactcacttgaaatgtctatgaatcaacttatgatgagaatgttatgtgcatggggtaaagttgatctttct

SEQ ID NO: 3662 - DNA, 200 bp, Lawsonia intracellularis
catttaagacatggatatctaaatagtgatgagtggagtagactttatcatgctgcagatgttctaggacaagcgcctatatttattgatgatacaccagcactatctcctcttgagttacgtgcaagaactcgtagattgaaaatagaatcagatgttggtcttgttgttattgattatcttcaacttatgcgtggtaa

SEQ ID NO: 3663 - DNA, 200 bp, Lawsonia intracellularis
taaacgtactgattctcgtgaacaagaaatttcagaaatttcacgctcacttaaatcattagcaaaagaaatcaatattcctgtggtagcattgtcacaattaaatcgtaaacttgaagatcggacagataaacgacctcaactctctgacttacgtgaatcaggagctattgagcaagatgcagatgtcatcatgttta

SEQ ID NO: 3664 - DNA, 200 bp, Lawsonia intracellularis
tttatagagatgaagtctaccataaacaacaagataatgctaaaaaaggtacggcagaaattattataggtaaacaacgtaatggacctattggaacagctacacttgcttaccttgcaaattacactgcatttgaggacttagagcctggtctttcggcttcaccttctgaaacttatagcaacatagcttaattctat

SEQ ID NO: 3665 - DNA, 200 bp, Lawsonia intracellularis
aagttacccatcataatttaaaagtatttggttagtattagttattaaacaaactggagccttacaatatcttaaattaattaaaaaatgttaactgactaacctatatgataatatataaaacttgattaacttaaaaactaattaacatatataatataattcatttagataaataaattatcactcattttttgatg

SEQ ID NO: 3666 - DNA, 200 bp, Lawsonia intracellularis
gatatgcatcctactactctatcctattttaactaaccaaattacaatttatttatttatccataaactaagattagttgcaaactcagtttcagtatatgttggtgtattgtacatacctgcagataacctttgacgtgaagcttctgctaaaataatagctgctgcaacagaaacattaaaactttgaaccataccat

SEQ ID NO: 3667 - DNA, 200 bp, Lawsonia intracellularis
acataggaatataaagttcactgtcaactaatcctgtaagttctggagggacgccagcatgttcattacccataataatagctgttgaaccagtaaaattatgtgataataatggttgagcttgtgacgtacaacttgtagcaattactttatagttatcctcttttaacattctaataagtttattagcagactgatgg

SEQ ID NO: 3668 - DNA, 200 bp, Lawsonia intracellularis
tagatagtttttacccacttttttgctgaagcagaacttttactacctaactttgggaaaggtgtatctgtgtaataaagatgtattgtatcaatgccaaaagcatctgcactacgataaatagcagatacgttatgtggatcatgtatatttgctaatacaagtgtcaaatttttttgtcgtaacgaaaggacatgttt

SEQ ID NO: 3669 - DNA, 200 bp, Lawsonia intracellularis
aatttttgctaatcgttctgaagtaatattttttcccacatattttctcgcttaaaataaattgcctactcaacatacaaagtattttttaggaaatagctatacgttgttgttctaatgcattaatttctaattcaagtttttcaagcttatctataattctgtctgtttgatcttttacttcactaaattgcttaaga

SEQ ID NO: 3670 - DNA, 200 bp, Lawsonia intracellularis
agttttgctgtttctattccacttccatgccctgcaggagtggctaatagttgttcaagattatgctgtttttctaataaaatagaaagctcttcttcaagacgtttgtaagctatttgctttggctttatcgtattatacagttcatttctctttttagcttgttctctttttaaactttttagttcatcacgactata

SEQ ID NO: 3671 - DNA, 200 bp, Lawsonia intracellularis
actaataacgctattttttttatttttttgggtaagacaatttttttgattatcctgagtttcaactattgttacttgctttaacccctgttttctagcttcatcatactgtaaaaaaccttgctcatatcgagtaagtccttcagaagaaagagcccaagcttcgtctgttacattagaacataaataacgatcatgag

SEQ ID NO: 3672 - DNA, 200 bp, Lawsonia intracellularis
ctacaacaagaagagtaccactaaaattactaagtgcattaacaagtgcttcacgactctctaaatcaagatgatttgttggttcatcaagaactaaaaagtttgctttattaagaaaaagagacgcaagtacaagcctagccttttccccaccagaaagcatttgaatagtgcgatcaaaatatccttgtccaagaaga

SEQ ID NO: 3673 - DNA, 200 bp, Lawsonia intracellularis
aataatcctagaacactcataagttcttcttctgtcattttaggatcagaaagtctccttatttctccaaggactgtacctgaagtatttagtatttctgtctgatgttggctataataacctaaccgtacccctgatcctagggttagagaacctcctgtagattttagttgtcctgcaataatcttgagcaatgttga

SEQ ID NO: 3674 - DNA, 200 bp, Lawsonia intracellularis
ttttccacagccattaggaccaacaagtgcaatacgttgaccatttaaaagactaaacgtaagagaaggccataattgacgaccatctggaaaagaaaatgataatgctgctgcagaaagaataactttatcagccttaagaggggttggccatataaacttaagctcttttcgcttgatttcaggtttatattcttcaa

SEQ ID NO: 3675 - DNA, 200 bp, Lawsonia intracellularis
gctcctgttcaagcttttttgccatcttttgccgagacgatgcttggcgtgcctttgtagccttagcaccaaaccttctcacaaattccattttcctttcaatttcatctgtaatacgttgtgtttctcgtgctttttgttcttcaatttcttcacgtaacaccataaattgtgaaaatgtgagtttccgaaaaactggc

SEQ ID NO: 3676 - DNA, 200 bp, Lawsonia intracellularis
ttcaatccaccaaggtataaaatatgtgtaccaacattatccatgaaaaccctatcatgagctacaaatatgagtatccctttatattctcttaaaaactcttcaagccactcaacagattcaatatcaagatgatttgttggttcatctaataaaagaacatctgcaccagcaactaaaactctagctaactttgccct

SEQ ID NO: 3677 - DNA, 200 bp, Lawsonia intracellularis
ttctctccaaccaccagacagtttagaaagtggtaaatcaaacatattatcagtaaaacctaaaccagaaagaatctcttttgctttatattcaggatgatatccatatagagtttcaagctctgtatgttttaaacttagctctgataacttctttgaatcatttgcttgaatagcttcttcccatgtagcccaaaagt

SEQ ID NO: 3678 - DNA, 200 bp, Lawsonia intracellularis
catgccaatcaggtagaacttcaagaacccatgtaagtaaagaaacatccagagcactaggagctaattcttgctctacatatcctatacgagttccttttggaataatcactcttccagaatcaggtatatcaacttcagcaataatacgtaataacgtagacttaccacatccatttggaccagaaacacataaccga

SEQ ID NO: 3679 - DNA, 200 bp, Lawsonia intracellularis
ataccagaatcaatatctaacgaaaaatctgaaaagatatcttgtccaccaaaagacttagaaaaattttgaatagtaattttcatgtattattcatctatatgttgaacgtcagctttcattctcttgttacgagcagcctcttgttttcgctcacgggttcctaatattttatatttattccaagaagaagaatgctc

SEQ ID NO: 3680 - DNA, 200 bp, Lawsonia intracellularis
ttgatgacgtgcaaaaataagaaatcctgtatgagctatcattctatcttcaggtctaattcgatcaataataggcttccaatgacgaatcaaaatttcacaaatctctatattatcaaatggaccattatctaaaccaagtaaaagttcatttatttggtttgtagtaggtacaaaaaaagctaacgatgctccaggag

SEQ ID NO: 3681 - DNA, 200 bp, Lawsonia intracellularis
atactgccttaggaataaatgttaggtattcccagggtgttctcacatcaagaaataaggcatcagcccctgttacctgaccaaaaccttctgatatatcttgatgatgcatagttacattatctcctaatccagcccattgtaaattatgctttgcaagagtataaaattcttctcgtgcctcaaaggtgtgtacatgc

SEQ ID NO: 3682 - DNA, 200 bp, Lawsonia intracellularis
ccagttgggcctgaaaaccatgataatgccatagttaaacttcctgaacctgtgcctgcctcaataactgttcttcctggcccaacaccaagacgtatacaaatataacttatatcttttggataaagcacttgtgtttgtcttttagtatttctaataatatcattaatagtaggtcgttgaatgcaacagggtgtacc

SEQ ID NO: 3683 - DNA, 200 bp, Lawsonia intracellularis
aagtgtagtaaaaatttcagtcccatatgatgcatgtacaatgtcatccaccttaagaatgccatcttgtgtatgtatatcctgatttttttcaattcgataaagtttagatttacctcttggtgttataatacaaacaagatctccatatgctggcatataatttccttttaatacttactatataaaatttaattcta

SEQ ID NO: 3684 - DNA, 200 bp, Lawsonia intracellularis
ctatgtagtcatacaaggtataaaacaagttcctagaatatataaagccttataccttgctaataaggcttaacaatactatcttaaaaaattatttccattctaagtagtgaggggaaaattgtgaagaaattttttattatactatttgttattattattctacttatatcaggtatcgccatattcatatataccaa

SEQ ID NO: 3685 - DNA, 200 bp, Lawsonia intracellularis
taaagataaaattacgttagctatttcaaaggctgttgagtctgccacaggacaaccactttacacagatagtataccaagtctttcttttttccccacccctgggattgaacttggaaaatcctcttggggaaaccctgatactaatgaaatttctgtagagctaataaagtgtgtctttagattttctctcttaaaat

SEQ ID NO: 3686 - DNA, 200 bp, Lawsonia intracellularis
tatttactggtactattgctattgatgaaatattttttgaacaaccttccattattatacaaaagaaaaatgcacaaaataaaaaaatacaatctacagctgcagtaacttcaactaatgccattaatcctcaagaagataaaaaagcatcctttcaacttccagaaataagtatttcctctgtcaccataaaagatggg

SEQ ID NO: 3687 - DNA, 200 bp, Lawsonia intracellularis
atgttaaaattttttgatggacgtaaacagataatacttaccggactacaattaactgcaaaaaatatttatcctcaaagcacaggtaaaatttctatacatactcaagcgttatttcaaccagaaaatatttcctttgtaacagaagggaatgtatcaattattcttgataaaaatatactttctatagaacatataaa

SEQ ID NO: 3688 - DNA, 200 bp, Lawsonia intracellularis
atttattattaatcctaaaactggattaacagtctcaactcccataactatagaaggaaatggacgctacctttttgataaaaatttgttagaaaaatcagatatacaagtaaaactagatcaatttaaaataaatgctaatggttcgttagaacttaataaacttcaaggaacagcagtaattaatgcgtctggttcat

SEQ ID NO: 3689 - DNA, 200 bp, Lawsonia intracellularis
taaaaaaacttgctagcaccttaggaatgatgcttatcactcctgaaacaaaaatttttgagaacttctctgctcaaagtaaagtacaagttaatggacaatatattcaactaacagatctcaaaattatgcttgatgatagccaagttaccggaaagctagctctaaatcttcctaataaactttctggaaatctttcc

SEQ ID NO: 3690 - DNA, 200 bp, Lawsonia intracellularis
ctaacaactattaatcttgatcaatacctacctatatcttttgctaaacatacaccagtaacaaaaaatctaatacaaacatcatctgtaactactgctcaacatactataaaaaacactcaacaacaaacaatctcttcttcacttccaacattagatcttaagttaactgctgatagtattattatatctaaattaca

SEQ ID NO: 3691 - DNA, 200 bp, Lawsonia intracellularis
tatagaaaaattaaatagtcaactacatggtaatccatcaaattatgtccttgatccatgtacttttattttttacgaaagtcctatttctgtaaaaggaaaaggaaatcttactgcatctaacccaagatatgaagcaacaattacaggctcacatattaatcttacatcccttcttagtgatatttctaaaacagcta

SEQ ID NO: 3692 - DNA, 200 bp, Lawsonia intracellularis
taatcaaaaaaggtactgttgatctgtctgcagaaataacaaccacaggatcaaatagtatacagttaaagcaaacattaaatggtaaagccactattgaaggaaaagatattaatattcaatttggtgcattacctgtccaaagcccagaacttactcggatatcacaacaacccttcacagaacttaatggaaaatta

SEQ ID NO: 3693 - DNA, 200 bp, Lawsonia intracellularis
aaagctgttaatggaactattaatatagaacaatttattcttaaaggaactccagttgctgcagcagcaaatggttcaattttacttcctaataacactatgaaaattaatgttgatattgctgtaaaagatactgttattccacttcatatatatggtgacttatcaaacccatcatatcgagttgaccctgcaagact

SEQ ID NO: 3694 - DNA, 200 bp, Lawsonia intracellularis
attacaaggtgctataacaaagatacttaataaaaaagaaaaggatatttttgataagcttcctttaccccaaaatgcaaaagagtctattcaaaatacagcagaaaaagtctttaacaaaattttcggccgataatataactttttaaacattgcatcataataaaaaaagagttgcaagaccaagaaaaataaaaaaa

SEQ ID NO: 3695 - DNA, 200 bp, Lawsonia intracellularis
ccaaaactatctgttatagctgtgagaaaaatactagaagcttgagcaggatcacgccctatataacggaagaaaagaggaatagctccccctgcaagggatcctgcaaccatatccgtcataagagcaccacccattacacaacccaatacaacattttgtgtcatccacattacaataactgaaacaaaaagccccat

SEQ ID NO: 3696 - DNA, 200 bp, Lawsonia intracellularis
aattaaccctgaagtaatacctattttaccttctcgaaaaacagcaagccatgctcttttaacttcaaaacgttctgttgcaagttgacgaatcataacagctaatgcctgctgacctgtattacctgcttggttagcaaccataggcattaagactgccaaaatagccatatgtgcaatcgaaccctcaaataaataaa

SEQ ID NO: 3697 - DNA, 200 bp, Lawsonia intracellularis
caacaaatgcagacaatgcagaagttaacatattaacaataagccaaggtaatcgcataaaaacagatacataccatggggtatctacggtttcatcctggcctgcccctaccattcctaaaagatcagaacttgcttcatcttgaatgatatcaataatatcatcatatgtagcaacaccaagaagatggccttcatag

SEQ ID NO: 3698 - DNA, 200 bp, Lawsonia intracellularis
tcaataacaggtatagccatcaagttataatgactaatttccttagcaacatcatgtttatcagtgtcataataagcaacaataagatcttgatgctttaaagcatgctgtaatacagttccaggttttaataacattaaatcccttaaagaaagaacaccaacaagtctactttcttcatcaataacatatgcataata

SEQ ID NO: 3699 - DNA, 200 bp, Lawsonia intracellularis
aataatttctttatactctatagtagtacgaatttgtgtaatagcttcatcaacagtaatgtcttgtttaaacatagacacttctgtattcataatcccgcctgctgtatttgggtcaaatgataacagcttgcgaagttcttctgcatctttttcaacaaggttatctaataatgcatccctatgctccttatctattt

SEQ ID NO: 3700 - DNA, 200 bp, Lawsonia intracellularis
catcaagaacatctgttgcatcatcaggagacatttctgaaataattttagctgcatctgcaggatcaagatgttctaatatatctccagctacatcctcactcaactctgcaagagcttctgctgcttcctctacaggaagattttgtactaaagaaagttgtttctcagtagagagtgtttctaagtattcagctata

SEQ ID NO: 3701 - DNA, 200 bp, Lawsonia intracellularis
tctgctggatgtataaagtctttattattctttaaatgatttaatgaaattgctactgctgtataatcagttagtcgagaaatattctccctagttaaactatgtggacgtattttatgagacaatttcatattactctcagataataaacttaatcttttagggcatccaaaactgcttgacgaaaattgccatgatac

SEQ ID NO: 3702 - DNA, 200 bp, Lawsonia intracellularis
ttaattttaatgattcttattaactataaaaagtactattatagtttcaattcttaatctgtttctaagcaaagttagggtatatgatccaacttcctatccggcaagaaaaatttttataaatataatctctagtcttaattataagtaaaaaaattatatgcattgcccaacattttcaaaatactttcaaggtaaac

SEQ ID NO: 3703 - DNA, 200 bp, Lawsonia intracellularis
cttataatcttcttataacaatgctcaaattagctcttgaagaagacgggatagattttacttcaaaaggaatattttcttccacagaacaaatccatacacaaattattgctaaagaacagacatgtgtttcaggactgcctgttatccctattattatgcaattatcttctcttactcataatgactatgtattaaat

SEQ ID NO: 3704 - DNA, 200 bp, Lawsonia intracellularis
atccttgtagatgaaggtcaagaagttcctataaatacacctatagcagagattattggccctgcctttactatactccaaacagaaaggactatactgaattttattagtcatctctctgggatcacaactactactaaaaaatatgttaatgctcttaaaggctctgatattatactattagatactcgcaagactct

SEQ ID NO: 3705 - DNA, 200 bp, Lawsonia intracellularis
gcctggattacgttatccagataaatatgctgttctgtgtggtggtggcatgaatcatagatgtaatctagaagaattattactaataaaggacaaccatattgataaagctggttcattaacaaatgcagttaaatcattacgtaacacatataacccttgtccgcctattgaagtagaatgtcgaaaccatagtgaag

SEQ ID NO: 3706 - DNA, 200 bp, Lawsonia intracellularis
tcattgaagctgttgaatgccaagttaaccgtattatgcttgataatatgtctatagatactctttgctcatcacttatggttatccctaaatctattcaagtagaagtaagtggaggtattactcttaataatctcaaaaatattgtaactagccaatataagcctcactatgtctctgtaggatgtattacaaactct

SEQ ID NO: 3707 - DNA, 200 bp, Lawsonia intracellularis
gcatcagctgctgattttagcatgcgtgttataagggagaaaagggtatgagtcgctttttgaataaagaagaaaaaagtaaacatataacaagcctaaagtcatcacttggaaatcaagtttctatattaggacatcattatcaagaacaaggagttattgatcactgtgactacacaggtgactctcttgagctagct

SEQ ID NO: 3708 - DNA, 200 bp, Lawsonia intracellularis
caacgtattgctcatttggactcagaacatattgttttttgtggtgtttattttatggctgaatctgcagcattacttgcaaaagaagaacaatctgtttaccttcctgaacctgcagccaattgcgttatgtctcttatgagccctgcatatcttatagaacgactatttaaaaaacttactgcttctggaagaaaact

SEQ ID NO: 3709 - DNA, 200 bp, Lawsonia intracellularis
tattcctgttgcttatgttaatactgaagtcgatgtcaaagctattgttggaaaatatggtggagcgacttgcacttcctctagtgctgataaagtattaaaatgggctctaaatgaaggagatggtgttttttttcttcctgataaaaatttagcatataatactgcaaaaaatataggtattcctaaaaaaaacttac

SEQ ID NO: 3710 - DNA, 200 bp, Lawsonia intracellularis
atattcttgatatccgaaaaaaaggggatgttgcagatcttgaagcatctaaacaagccgatattattgtttggccaggactgtgtgccattcacgcacgattccttatgcaacatatccatttagcaagagaaaattatcctaattgtactattgtagtacatcctgaatgtacaccagaagttgtaaaggcttctgat

SEQ ID NO: 3711 - DNA, 200 bp, Lawsonia intracellularis
gcagtaggttcaacatctttcattattaattatgctaaaaatgctcctgatggttctcatattgttattggaactgaaattaatcttgttagtcgtcttaaaaatgaacataaacatagaataaaaaccactccacttagagcaagtgcatgttcacatatggctaaatgtaaccctgataaactttataccacactaca

SEQ ID NO: 3712 - DNA, 200 bp, Lawsonia intracellularis
tagtattgctaataataatgcaacaccaatatcaattgaacaggaaactaaaacgtttgctcgtgcagcacttgaacgtatgatgcaaattattactgtatagaactatatcaaaaccaatgactctaagtaaatagtcaaggtattatttatgaatcaacaccgatattactctcaagtacttattattggtggtggca

SEQ ID NO: 3713 - DNA, 200 bp, Lawsonia intracellularis
ttgctggagtaactacagcacttgtcttagcagatgcaggatttgaaatcacacttattgttcctagtaaagaacttgatggtggtaattctcagcttgctcaaggaggtattgttttccattcacaagatgataacaaacagcttgaaaatgatatcctcaatgcaggccatcaacataactatttaaaagctgtacgt

SEQ ID NO: 3714 - DNA, 200 bp, Lawsonia intracellularis
ttcctttgtaaaaaaggaccagaagtagttcatcgtctattaatagaacgtataggtattccatttgaaatcgataaacagaaaggaacatggagtgttactcgtgaaggaggacatagctctgctcggattattcattgtgctgatcatacaggaaaatctattatggaaggtcttctaaaagaaatacaaaaaacttc

SEQ ID NO: 3715 - DNA, 200 bp, Lawsonia intracellularis
taatattcaaatccttactcatagaacagctatagaccttattacaacacatcatcatgcaaaactgaaagaatatcgttataatcctgagaatcagtgtttaggagcatatgtttttaacgaacagacaaatgaagtagaaacactacttgcagattggacagtattagcaacaggaggaataggacaaatatatcttc

SEQ ID NO: 3716 - DNA, 200 bp, Lawsonia intracellularis
atactacaaatacagaggcttctataggctctggtattgctatggcgcatcgtgcaagtgttaaactcactgacttagaatatatacaatttcaccctactgctttatatagttgtaataaaacacaaaaatttttaattactgaagcattacgtggtgaaggtgcaaagcttacgaatacacaaggtaaagcatttatg

SEQ ID NO: 3717 - DNA, 200 bp, Lawsonia intracellularis
aaaaaatatgatacacgtgctgaacttgcacctcgtgatatcgttgccagagcaattatggaagaattattacatactggagaacaatgtgtatacctagatctttcaaacgtatcacatgatattaccaaacgttttcctactatctataattattgttatcaacaaggtctttcaataaaaaattctcctatccctgt

SEQ ID NO: 3718 - DNA, 200 bp, Lawsonia intracellularis
tgttcctgcagcccattatttttgtggcgggattcttactgatacccaaggacaaacctctctttcaagattgtttgctgttggagaatgtagttgtacaggtgtacatggagctaatcgccttgcaagtacttcattacttgaagggttactatggggttatagcacaggattacatatttcccgaaaaaaaaataaaa

SEQ ID NO: 3719 - DNA, 200 bp, Lawsonia intracellularis
agaactttttatctacacgtattatcaatgctattccaaattgggagtgtacaggtaatgaaaaaaatgatgatccagcacttattacacaagactggacttctatacgacacattatgtggaattatgtaggaatttgccgaacaggtagtcgactcaagagagcttttgaagaacttagggatctttcaagacatctt

SEQ ID NO: 3720 - DNA, 200 bp, Lawsonia intracellularis
catgatttttataaaaatactcctatttcaaaaccaattatagatctctttcatggtagtcaaactgcttatattataacccaaaaagcacttctcaacacaaaaagtataggttgtcactaccgtataaattaatgtaggattaagtataacctttagtttctctcatatctttttatgaatgtagacttatccttcta

SEQ ID NO: 3721 - DNA, 200 bp, Lawsonia intracellularis
gcatccctgcatactgaaataatgatcgaactacaattgtttgtaataactgtataataatcaagacaacaataggagataagtctaacccaccaacaagtgtaaaaggaagaaattttctaactttataaaaaactggctctgtaagggcataaaacatacgaacaatattattatatggatcaggtcttacccatgtt

SEQ ID NO: 3722 - DNA, 200 bp, Lawsonia intracellularis
aataatacagctataatgacaatccaaaagtacaaagaaagaataatatcaagaacccttgcaatacctaataaaatatttccaaaaacaaacatagtccctccaataaaatcttcctcaaatgttctataacccttaatatcttataattccctataaactctaaggaatatagctagtatccaataccatttttttac

SEQ ID NO: 3723 - DNA, 200 bp, Lawsonia intracellularis
ttattgataaagaccttgaagggcatcatataagtctgaaaatttctcaatatgtattgatgcagaaagagatgtattgcaataagctattaatggtatagaagcagcacgagctgctccttcatcagttaaactatctccaataaaagctactttagaaggttcagtattccatatttctagtattgttagaagtcctt

SEQ ID NO: 3724 - DNA, 200 bp, Lawsonia intracellularis
caggatctggttttgcaggaaaaagatcagatgttataataggatcaaaaaatccatttaaatctaatgaaagtagcacatcatttattcctttggaaactcgatttgtattaataccaagttgtattcctctactttttaaccaatgtaataaattcatcaatcctggctctatcttaaggtgcggtaatacttcattt

SEQ ID NO: 3725 - DNA, 200 bp, Lawsonia intracellularis
ttataagaaaaacgttgtgttacttcttttagtttttctctatcttcatgtgcaataagaaagttcatagcatcttgcacagaagccatctgcacataatctgcttcttcttttgtcatattaggataaccaagctcttgaagtattttattaaaataacctacattaatacttttagaatcaataataacaccatcaca

SEQ ID NO: 3726 - DNA, 200 bp, Lawsonia intracellularis
gtcaaaaataattcctactataccctgaggaaatatattttttacttggttaaataacgagttattatatgacatataaatccttatcttaatgttatcttatataacaaatggaaacactttctttttaaaaagaacaggtgtaattacatagtaaaagatatatttaaatatagttagattaattccaaatccttgac

SEQ ID NO: 3727 - DNA, 200 bp, Lawsonia intracellularis
ctatagatattgaatagatattctatactgataattggaggcaatatgtatggtattggcatgcaagagctcttagtaattcttgtcatagcagttattatctttggcgctaaaaaactccctgagattgggggagggctaggaaaagctatacgcaactttaaacgttcaagttctgaacctgatgaaattgatatcac

SEQ ID NO: 3728 - DNA, 200 bp, Lawsonia intracellularis
ccctacgactaataaaactgataaagttgataatgataactagctaataataataataataataataatttatattatactatcatatagtaactctattcttatgctatacctacagtaaaaatatactataacttgcataggatacagtcaaagttatacattacaaccaattaaataaccttttccaactaccatga

SEQ ID NO: 3729 - DNA, 200 bp, Lawsonia intracellularis
atttgttctctttcagcttgtgactcttgtttcctgtataaaaaatatgctgctaacgatctttcttttgtatactcagacacactaggaacatcagaaaagttttctaaaataaaggtatatctcttccatgctggaccatacttacccatattccaaaatacattagcaatataaagttcatgttctaccataatcaa

SEQ ID NO: 3730 - DNA, 200 bp, Lawsonia intracellularis
tcgacaagctttcatttcatttacagcagcttcagcatagggagaatcagggaaagtttcctgaactctttgaaaatactcataagcttcttgtatagacgttgttggcctatcaatagaaataaaagtttttaaatttgacattccaatttgatataagacatatggaatatctggatgacgaggatgaagcgtctcaa

SEQ ID NO: 3731 - DNA, 200 bp, Lawsonia intracellularis
attctttataagcttctacagcttcagcgtacttttcatcaaaaaaaagagcatcaccaagtgcacgctctgcttcaactgtatatggactaagtggataattatcttttaatttttcataatactctgctgcttgtgcataatgtttttcttccattgcatcttttgcattttcataaagttcttgtgctgtttgttca

SEQ ID NO: 3732 - DNA, 200 bp, Lawsonia intracellularis
ggcctaggtactgcaaaataatcaattataccacaaccaggaagataaactaacattataactaatactacataacgaatatacatataaattaaacatccaattgttcaatatagctaaaggctgctgttgctgctgttgctccatcaccaacagctgtaaccacttgacgacattgctttgaacgtatgtcaccagca

SEQ ID NO: 3733 - DNA, 200 bp, Lawsonia intracellularis
gcaaaaacacctggtaaatttgttctcatctcactatctgttaaaacaaaaccacttgcgtctaaagcaagttctgaaggtaaaaaatcactttttggctcataaccaataaagataaataaaccacttacttcaatctttgatatcacttgtgttttaacattttcaacttcaagagcttcaagctcactttcaccatg

SEQ ID NO: 3734 - DNA, 200 bp, Lawsonia intracellularis
aagcatagtgatacggctatctaaaataagctttattttattagtagtagccattattttatcttgataatgtttatttgcacgaaatttatcacgacgatgtattaaatacaatttttttacaatacgagaaagatataacgcttcttcaagggctgtatttcctccaccaacaacggctacaacctgatcacgaaaaa

SEQ ID NO: 3735 - DNA, 200 bp, Lawsonia intracellularis
agtttccatcacataatgcacaatatgaaacacctcgacctctaagctcgctttctctctgcaaccctaacattttaggggaagcacctgtacaaataataatacttttcccaataatgtctttttcaccgactgtaagcttattttcacctggagtatgaataaaagaagttacattatcattataacgagtaagtgta

SEQ ID NO: 3736 - DNA, 200 bp, Lawsonia intracellularis
tatccgtcgagatgtgctgaaaaaaagtcagctaactcccaacctttaatacctaaagggaatccgggataatttgtaacctcttctgttttcagaagttgacctcctggggcaagcatttctattagtgctacagataatcctgaacgacataaatataatgcagcagttaaacctgcaggtccaccacctacgacaat

SEQ ID NO: 3737 - DNA, 200 bp, Lawsonia intracellularis
actgtcgtattgcttcatgataacgccttttctttaagcatagtaataatacttgttttagagacagctcctgtaagttgctctaccacttcaccatttttaaagagaataagtgtaggaatagctttaataccatactgcccaggtgttatcgtattttcatctacattcaactttactacatgtatatcacttgcata

SEQ ID NO: 3738 - DNA, 200 bp, Lawsonia intracellularis
ctcaagagctatttcgtctataataggaccaatagcacgacatggcccacaccaaggagcccaaaaatctactaacactggtttattagattttaaaacaatagtatcaaaatttgtatctgtaacttgggcagccataggttcctccttaatagagaactatcatcttttaataaaaacaactgttatactttagaagc

SEQ ID NO: 3739 - DNA, 200 bp, Lawsonia intracellularis
tagttataaaaactgtcaagatgaaagcattactatgttataatttcattgatgatagtaaaattatactttcaccatgtcatctggaatatgttgtcctcttggaatagcagaaagatctaatctatgacaatatcctttctctgctaataactctccataataagctatcattactgcattatctgtacaaagctttt

SEQ ID NO: 3740 - DNA, 200 bp, Lawsonia intracellularis
gttcaggtaacaatatttttttattataattgatagcaagattatgcatagcttgacggacaaaagaatttgcagctaaccctccagcaacaataatagtttttatctcattagtatatttttgaagtgctctttccatctttatatatagtgtttcagaaatcgcaagtaaataggaggaacaaacattataaagctct

SEQ ID NO: 3741 - DNA, 200 bp, Lawsonia intracellularis
tctttaatggctactttactattatttgaacaataacgttgaccttcttcaataagttgaggatattgctttagatacattgcagcagacgtcttaagaccactaaagctgaaatctagttctgaattatgtatatatggtcgaggaaacaaatatggatctgggattccttgttgagctaatttatcaataataactcc

SEQ ID NO: 3742 - DNA, 200 bp, Lawsonia intracellularis
accaggataaggtagccctaacatttttgcaaacttatcacaggcttcaccagcagcatcgtccaatgttcttgccaaaagaataaaaatatctggagcatctattttataaatgtgtgtatgacctccagaaacaaggagtcctaatgctggatactctataggttcctcaatagctgccacaaggagatgagcatgta

SEQ ID NO: 3743 - DNA, 200 bp, Lawsonia intracellularis
gatgattaatacctattaaagtcttaccagatgctaatgctagaccttttgcaaaagctaacccaacaagtagtgctcccaataaacctggtccacgtgttacagcaataacgtctaagtcagctaaggtaaccttcgcatcttccataagtttatcatataatggtccaaggcacctataatgctctcgagatgcaagc

SEQ ID NO: 3744 - DNA, 200 bp, Lawsonia intracellularis
tcaggaacaacgccaccaaatagagcatgtaaaggtgcttgtgttcctaagatagaacctatacattttccattttcaacaagggcaacagcagtctcatcacaagatgtttcaattccaagacataacataagaataataaataatatgatgtaataattaaataaaatagtgaattaagatgattactagttaagaaa

SEQ ID NO: 3745 - DNA, 200 bp, Lawsonia intracellularis
taggaaaaaatatggtagattatatatagatatattacttatactttgcatagatgttagcaacagcctcaacatctttcttagatcctatgactagtggaactcggttatgtaaacttaatggtacataatccaaagttctataaaggccatcagttgcagcacctccagcattttcagctacaaaagcaagtggtgaa

SEQ ID NO: 3746 - DNA, 200 bp, Lawsonia intracellularis
gcttcacataaatagcgtagctttccatgcattttccccttacgattatcagatggatacatgaagactccaccataaagaagcgttctatgaaaatctgcgactaaagagccaacatatcttgctgatcgtactttttctttagaagatggctgcttaaaatacattacagcttcacgagtgggtgtatcccaataatc

SEQ ID NO: 3747 - DNA, 200 bp, Lawsonia intracellularis
ccaataaccttcgtttactgaatatataaaaccttcgtctggtattttaatatcagtatgtgaaagtaaaaattcaccaacactaggatctaatgtaaatccatgaacaccttgtccagcagtataaacaagcattgttgatgtaccatataaaaaatatccagcagcaatttgttctgaacctggctgtaatacttcat

SEQ ID NO: 3748 - DNA, 200 bp, Lawsonia intracellularis
caagttcaacatctccagttttaccaggcttacgacgtaatatagaaaaaatagtcccaacattaatatttacatcaatgttagaagagccatctaaaggatcaaatataaggatataatcaccacgagggaatgcagctgaaactttgatcaactctgcgtgttcctcagaagccatagcacataagacacctgagcgt

SEQ ID NO: 3749 - DNA, 200 bp, Lawsonia intracellularis
tccattctatacagaaggactttatctgcaaattcatctaacttttgtactttctctccctgtatattaatatcacctgtccccccaagtacatcaagtaatcctgctttatttacacttcgagaaataattttagctgataaaattaagtcatgaaataaagatgtaaaatgtcctgttgcttgaggagccctctgctg

SEQ ID NO: 3750 - DNA, 200 bp, Lawsonia intracellularis
ctgcaaaaggagatgttcggtcacagtaacttcagaagacatgtcttctcctaataaagacgacaaattaaattacacatacagattatgtaatggaatactacctattacgtaacagaacaaccccctgcttactcatattttaactgaattagctatggattttctgagttttctaataacgtattttgagcctctat

SEQ ID NO: 3751 - DNA, 200 bp, Lawsonia intracellularis
ttctgtattttcttgcaaatcaacaaggaaacactgattagtttcttcaaaaaactttccagatacaggtgttgcaaaaactatttcttgattacctataaagtgagataaccaaaaaaattctccattttggttagataccctaccactaaccgaattttttagtaatgattcccaattttctttagcaaggggggtat

SEQ ID NO: 3752 - DNA, 200 bp, Lawsonia intracellularis
cttcaaatgaaaactgccctgaccataatacagcttctggagaaaagataactagagccttactatatggtgaatataatgataacttctctatgtcaaaatatacaacaaaaagtgctttcatatctgagtcaacatatacaggtacagaaaaaaatactttgggtccaatacttgtttcttgaactgctgctcgaata

SEQ ID NO: 3753 - DNA, 200 bp, Lawsonia intracellularis
tcacgcaacatctttcctcttggcttagcctctataattttggctaaatcagatttttctaatagattctctggctcttgtgctattagttctccgtttggttcaataagaacaactccagataaccaaggaaatgtatttaataatgctataatactttcatcagatgggggtttgtctgagttttgaaggtaccgttg

SEQ ID NO: 3754 - DNA, 200 bp, Lawsonia intracellularis
aagagcttcaagctgtgtatcaatacccatcattcttgaagctagaataacatctttttcatctaacttatcagtatctgagtaattaatacaagctggtttattaatatagctaccatagaacttttttgtccttttccatgaatttgaaacactctgaataccacaacctgtgataataattgttagtcccagacaaa

SEQ ID NO: 3755 - DNA, 200 bp, Lawsonia intracellularis
gaactataaaaatattacgggacattaataactcctgatccctagaatataaatttaaccttttgctcttttttcaagacgtgttactaaggcctctaacatagcaataacttcagcctgatgattgatattataactgttcgtagtagaactactaaaactagacgcattcctagcctgtgctaacatttcactaagct

SEQ ID NO: 3756 - DNA, 200 bp, Lawsonia intracellularis
ctacttttcttgcatgtaaagaaactatctcttcatgattagtagcttgagactctaattcttgataaatttttattgcacttacaatatctccttgttcagcaaggacttctgccattgaacgtgtacaaactggaaaagaatcatccttagatttagatactactgccatatcctccggacgatcaaaaaaaagctct

SEQ ID NO: 3757 - DNA, 200 bp, Lawsonia intracellularis
tcactatcaccgacttcttctatgtcaactatatcattactagactgaactataccagatgactgtgagcttgtctgtagtgaggcaaatgactgtttagtgttagaataatgtgaaaactctgttgattttctttcagataatccttttaaaccataagataaaaattcttttagcgtcaaatctgggtataatacaag

SEQ ID NO: 3758 - DNA, 200 bp, Lawsonia intracellularis
agctgatattaaacccatataaagaccaaagtcacctccaacctgtgcaccagattgtccccatgctgcccaaaaatcaggatattgattaaaaagattagcaattaaaatgctttcagatgagcaaccttccatatctccaatactatatagaagatgtattaaaaaaagtcttgcttcaagaaaatctggatgatgtt

SEQ ID NO: 3759 - DNA, 200 bp, Lawsonia intracellularis
caagaccatgtcttagtgtctcaagtgcttttgtaacatctccagactcaaataaaagctttgcaagagggaaaaaaactctagagcttggttcttgttctaatatttcctgaaaccattcgattttgggggtcatttaggtgactcctaggacctaattaatctttttttattgtaattaaatataatatttcattatc

SEQ ID NO: 3760 - DNA, 200 bp, Lawsonia intracellularis
ttttacaaaatttagatgttgccttatcatcttttcaatataactgggattactatgcaataattgtatctcatgacttaaccttgcaatagtatcatcatatttctgtaactcttgagtaatagatttatgttgcaaaatcaattcccgataagaaataagactgtgagcaccccaaactagtctaactacaagtataa

SEQ ID NO: 3761 - DNA, 200 bp, Lawsonia intracellularis
tatttaataagatagctatcgataatactccaagctttaaaaaagctgatctactagatacactatacacacttgttatccttatttatattgccaatttttataaaaactatagaaatactttactcctgaaagtacagtgagaataagggctatgtaaagtaaaaaaagtcctatcttataaaaatctataccaaata

SEQ ID NO: 3762 - DNA, 200 bp, Lawsonia intracellularis
aggaatagtgtaaaagaagaggaacaatagcgaccatttgaagaattgttttaatttttccataattatctgctgcaataataattccttcatctgctgcaatagctcttaggcctgtaacagcaagttcacgaccaatgataataatagttacccatgcaggaacccaatctaacttcacaaacataataagaatagaa

SEQ ID NO: 3763 - DNA, 200 bp, Lawsonia intracellularis
caaataagaagtttatcagctaatgggtcaagaaatttaccaaaacttgtcaccatattttctttacgagctatatgaccatcaagataatctgtaacagaagcaatacagaaaagtaatgtagctaaaaaacaagttattggaccttcaaaataaagtaatactattatgggaataacaaaaacagtcctgactaaagt

SEQ ID NO: 3764 - DNA, 200 bp, Lawsonia intracellularis
aatagagtttgctagattaagtattatcttcatccaaatcatcctctttcacattgctctgatgttttagcaaaactttttcctcaatcttcgttatcttaactctactaatatactagcaactattaacaacatattataataattaagttattacctactgttactaatacaaaaacagctttaatattaaatgagcc

SEQ ID NO: 3765 - DNA, 200 bp, Lawsonia intracellularis
ttaatgcgtttaatgtagcttctgtaagctgcaaaaatttttctttagcttctgaatgttcttccatacaaacgactggcttcccacagtcagctgcaactactgttaaaggatcaagagatatttgacctaataaaagaagattttccttatcagcaagttgaacaccaccatcttttttaaaaatttcaatttcatga

SEQ ID NO: 3766 - DNA, 200 bp, Lawsonia intracellularis
ccacagttaggacaagaaagaccactcatattttctacaatacctaaaataggtgctttaatttgacgtaaaaaatccaaagcttttcttacatctgccaaagatatttcttgtggagttgtaacaacaatacactttgcgtctggaatggaattaaggacagccatatgctcatctcctgttcctggaggggaatcaat

SEQ ID NO: 3767 - DNA, 200 bp, Lawsonia intracellularis
aagaagaaaatcaagatttccccaataaactccacttaaaaactgcctaatagctcctacttttttaggtcctttccaaacaatagctgtatcttctttttctaaaaaagaatccattgaaactacacatagcttatcattataaaaaacaggaatcatacgtccttgctcatcaacttcaacatgtcctgaaagaccta

SEQ ID NO: 3768 - DNA, 200 bp, Lawsonia intracellularis
ataaacgtgggatgctaggaccatgaagatcaacatccaaaataccaacacggaaacctttttgcataagagaaacagcaaggtttactgttacagagctcttaccaacaccaccttttccactcataataaaaagtttatgctgaatagtatctatatttttttttaattgcttatcttgcatagcaggtgaaagagga

SEQ ID NO: 3769 - DNA, 200 bp, Lawsonia intracellularis
atattcatagatagttatcctttaatttaaggatgttaatagtgtatggattcaatatataaaaaaatagaattccactagtatatatttaccaaccataatctcccacaaggtcaacaaaagcaacattaccaataactgttgatgtaacagtgttattctttttggttatacacatcaactcttgttctcgtgggttt

SEQ ID NO: 3770 - DNA, 200 bp, Lawsonia intracellularis
tgaccgacaggaataaccataactcctggatctcctagttgattaagtaatggtaaggggatatttggaccaccagcagtaacaataattctatcaaagggagcatgttcctcccaccctaaggtcccatcagaaaggcaagttctaatttttctatatcctaacaaaaaaaataattcttttgtttgaaaatacaactc

SEQ ID NO: 3771 - DNA, 200 bp, Lawsonia intracellularis
cctaacacgttctagactaaatacctcaagacctatattggctaagatagctgtctgataaccagaaccagtaccgatctcaaggacacttaaacctggagtcggctcaaggaggctagtcataatagcaacgatatatggacgagaaatagtttgcccataacctatagggaggggatagtcgtcatatgcacgacttt

SEQ ID NO: 3772 - DNA, 200 bp, Lawsonia intracellularis
gtaatgcttcaggaacaaataagtgtcgatgtacattacgcattgctgtaagaacataagagttagtaattcctctttgttcaagttgtgtaataaccatacgctcacgctgacgcctcaaatcgctagccaaaggaaaattattttttgatgtatggtatctcaacatttatccaaacttttttgaaaagaacctaaac

SEQ ID NO: 3773 - DNA, 200 bp, Lawsonia intracellularis
taaatagtacaatatcaacctttaatacctaactcaatagttaattatagtagaatattaatgctatctatattttccttattgtttttatagaatcactatccattcttttataattttttttttactatgttagtatatagagttatcttaaccaaatctcttttctaactatcacttaacaaaatgttgcttattat

SEQ ID NO: 3774 - DNA, 200 bp, Lawsonia intracellularis
aatatttattactaaccagttacataacctatgttacttgctgatttgttttactctcatcatttttattttttaacttcacataatcttatatgaacacactgatagttgcttttctaaaaataataccataaaaattttaaaggaaataacagccagttactaagtcttatttaatcttttgagagtgtatatgtcca

SEQ ID NO: 3775 - DNA, 200 bp, Lawsonia intracellularis
agacaaaacttcttgttataactataggaatagccagtattattcttgccgctgctacttacatttttttcaaaaacacagatccacctattatatctatgattcaacctacacaatatatttctccaagacaaccactaacacttactattacaagtaaatactcgcctctcaaacttattcaaattatagtgaaacaa

SEQ ID NO: 3776 - DNA, 200 bp, Lawsonia intracellularis
aatgaatacacaaaaacacttatcaatcaacctatcatcaatggacaccttatagaaacagttgatatagactttaaaaaatcaggcctccaagatggaccttttgaattaatagttaaagcacaagactcgtcctactcaaactttgggaaagggaatatttctaacaaaacatgggatatgaactttgactctcaacc

SEQ ID NO: 3777 - DNA, 200 bp, Lawsonia intracellularis
accacaaattacaatccatagtcctaccccatcactccataaaggaagtgctacagctattgctttcactgtatctaagccagtagcagttataggggttcaacttgaagaaaaattttttccagcatttcagcaggctaatggaacgtattattgcttctttccattcccaattgagttttctccaaaaacatttaatc

SEQ ID NO: 3778 - DNA, 200 bp, Lawsonia intracellularis
caaaactttttgcacaggatcttgcaggtaataaatcttatatatctgttcatgttcactcattagagcgctctttcaaaatagatacattaacaatcactgatacattcttagataaaaaaatgcctaactttgaacaaaattttcctgatactcaaacacaagttgaacgctatattaaagtgaatagtatactacga

SEQ ID NO: 3779 - DNA, 200 bp, Lawsonia intracellularis
atcgaaaatgaaaaaaaacttattgaaattagtaaaaaaacatcccctatgatgttatggtcagggaaattccatacactcccacgtgcagctgttaaagctacctttggtgaaaatcgaacatatatgtatcaaaatcagaagattgatcaacaatttcatatggggcttgaccttgcctcaacagcaaatgctcctat

SEQ ID NO: 3780 - DNA, 200 bp, Lawsonia intracellularis
ccctgctgcaaatgatggtatagtggtctatacaggcgacttgggaatatatgggaacattgttattattgatcatggattaggattacagacactatactctcacttaagtaaaattacagcaaaagaaggtgacgttgtaaaaaagggtgatctaataggctatactggcatgacaggactagctggaggtgatcatc

SEQ ID NO: 3781 - DNA, 200 bp, Lawsonia intracellularis
tacactttggttttcttgttggaggcattcaagtaaaccctattgattggcttgatccaaagtggattaaaaatactattataacccgactcaataataatgtataacctttatagaacattattctataagtaaaactaaagcttttctatagataagattagttgaaaaaaagtcctaataattattgacatattgtc

SEQ ID NO: 3782 - DNA, 200 bp, Lawsonia intracellularis
ttgacatatctttgttgttcattttactagttaacggctttctaaacttcgtaaataaacacacactaacagcggtctggggtgcccctatctaagaggtagtaaagacctgggttattgtggaagtaaaccccttaacgtttcaggagaatcttatggcttatgttagcatgaaacaaatgctagaaactggtgtccac

SEQ ID NO: 3783 - DNA, 200 bp, Lawsonia intracellularis
tttggtcatcaaactcgacgttggaatcctaaaatgcgtccttatatttttggagcccgtaatggtattcatatcatagatcttcaacagactgtaaaactttaccgtgctgctcatgataaaattgtagaaactgttgctgcaggtggaagtgttctctttgttgggactaaacgtcaagcacaagaagctattgcaac

SEQ ID NO: 3784 - DNA, 200 bp, Lawsonia intracellularis
tgaagctactcgagcaggacaatattatgtagctaatcgttggatgggcggaactcttactaacttctctacaatacaaaaaagtattgaacgtcttaaccgtcttgaaactatgttctctgatggctctgttaacagataccaaaaaaaagaaatattaactctcaaccgtgaaatggataaacttgagttaacacttg

SEQ ID NO: 3785 - DNA, 200 bp, Lawsonia intracellularis
gtggtattaaaaatatggaacgtctaccacaactcatttttatcattgatcctcatcgagaaaatattgctgtaaaagaaggtcgtaaactaggaattcctattatggctgtaaccgatacaaactgtgatccagatcttattgactatattattcctggaaatgatgatgcaatacgagctataaaactttttgttaca

SEQ ID NO: 3786 - DNA, 200 bp, Lawsonia intracellularis
gctatggctgacgcctgtattgagggtgaagctttacaaaaagatactaagaataaaaatcttgaggaagaattaaaacaaatagctacggctgaatgtaataaagaatctacctctatagagcaagagcttattatagcttctgaacaaacagaaacaaaagaaaataatattgaagaatcagtatcagaagtagttat

SEQ ID NO: 3787 - DNA, 200 bp, Lawsonia intracellularis
tactaatgagtctgaactcatcacagaataattttataatgccctggagatagattatgagtatcagtgcatcaatggtgaaaaccttacgtgaaagaactggcgcaggaatgatggattgtaagcaggctcttgaagaagcaaatggagatatggaaaaagctatcgactggttacgtcaacgaggcctctcaaaagct

SEQ ID NO: 3788 - DNA, 200 bp, Lawsonia intracellularis
tcaaaaaaagctggaagagcaacaacagaaggtttaattggttgtcaagtacttcctggctcaacatctgctgtacttgttgaggtaatgtgtgaaacagattttgtctctcgagatgaagtctttaaaaaatttgttgatgacattgtttcgcaacttgtggcaaattttcataataatgatgttgatctgcttgatca

SEQ ID NO: 3789 - DNA, 200 bp, Lawsonia intracellularis
accatctggaaataaaaatcttagtattagagatctgttaaatgaaactattgctactataggagaaaatattgtcattggccgatctataaagatggagttaacacctgggaaaaatggtatgattggacactatgtccatactaatgggaaaattgctgttttagtagaactagcaacagaaacaaaagaaacagcct

SEQ ID NO: 3790 - DNA, 200 bp, Lawsonia intracellularis
catcacctaagttccaagagttagcaaagaatatagctatgcaaattgctgcaacagcacctcttgctcttaattctgaaagccttgatcctttaaaaattgatcgtgaacgtgaagtatatcgtcaaaaagcactggaagaaggtaagccagaaaacatgatagaaaaaattgtagagggagctgtaaaaaaatatcta

SEQ ID NO: 3791 - DNA, 200 bp, Lawsonia intracellularis
aaagaagtttgtttattggatcaaccatatattcgtgatgataaactttctatagctgaacttataaaaaaagtttccaatgaaattggagaacctatatctattatagagtttgttaggatccagctaggcgaagaatagctttaagaaataaaaagggggcgtttgcccccctttttatattataacttaggataaaa

SEQ ID NO: 3792 - DNA, 200 bp, Lawsonia intracellularis
aaatattttctatagtattatatagttctaaacagagtctctatgcatactttttctaatgctcacgtccttatcacagggggtcttggatttattggttctaaccttgcgattcgtttagtaaaagaaggagctaaagtaactattattgatagtctcatgcctatgtatggagggactatgtataatattcatgacat

SEQ ID NO: 3793 - DNA, 200 bp, Lawsonia intracellularis
tgcagataaagttagaattaatatctctgatatacgtgatccctatagcataaaagcactagtaaaaaatcaagatattctatttaatcttgcaggccaaacaagccatatagactctatgattgatccatatacagaccttgatatcaactgcaaagcacaactttctatccttgaagcctgtaaaaataacaatcctt

SEQ ID NO: 3794 - DNA, 200 bp, Lawsonia intracellularis
ctattcgtattatttttgcaggaactaggcaaatttatggaatacctcaatatcttcctgttgatgaaaaacatcctgtgtaccctgttgatgttaatggtatcaacaaaatagcaggggaatggtatcatatactgtataataatgtatatggaatcaaaacatgctcattacgtctaacaaatactattggtccacgg

SEQ ID NO: 3795 - DNA, 200 bp, Lawsonia intracellularis
atgcgtatccgtgatgatcgtcagacatttttagggatatggattaaaaacgtactttgtgggaagcctattgaagtgtggggaggagaacaattaagagactttttgtatgttgatgattgtattgaagcacttcttttagcggctaaaaatgaaaatacttttggaaaagttttaaatgtaggaggaaaagaaccagt

SEQ ID NO: 3796 - DNA, 200 bp, Lawsonia intracellularis
ctctttacaacatgttgcagaattacttattgaagttgtaggtgaaggaagttatataataaaagagtaccctatggatagaaaaaaaattgatattggtaactattatactgataatacattgatatctgatatcctaaactggaaacctacaacatctttacgtactgcactaaaaaagacaattgcttattataaac

SEQ ID NO: 3797 - DNA, 200 bp, Lawsonia intracellularis
ctattcttaatgaatacctttaattcatgactaacacttactctattcctcaagctaaccctagcatttacttccaacagtatcgtgaaactattataaaaaaaatagaggaagtacttaatagtggttgttatattaacggagagcaagttgaactttttgaaaagcaatttgcccaatattgtaatgtaaaacatgca

SEQ ID NO: 3798 - DNA, 200 bp, Lawsonia intracellularis
gttggtgtagctaatggaaccgatgctatagaacttacacttcgtgcgttgaatattggccctggagatcttgtttttactgtttcacatacagccgtggctactgttgctgccattgagcgtacaggtgccctccctgtcttagtagatataacacaaaatacatatacaatgtgtcctgtaagtcttgctgaaacact

SEQ ID NO: 3799 - DNA, 200 bp, Lawsonia intracellularis
tgcagctgcttataagggaaagtatcctgggaagccagcagccattatccctgtacatctttatggagaatgtgcagatatgaatgaaatacttcatgttgcaggacagttacctgttattgaagattgcgcacaggctcatggagctaaatataataataaaaatgctggtagtataggtattgcaggaacctttagtt

SEQ ID NO: 3800 - DNA, 200 bp, Lawsonia intracellularis
tctatccaacaaaaaatcttggaacacttggtgatggcggttgcatagtgacttctaacacactcctagcagaacaaataaaagcacttagagaatatggttggaaacaacgctatataagtaactttcctggaattaactctcgtcttgacgaacttcatgcaagtattcttaatatatttcttccagtactcaataaa

SEQ ID NO: 3801 - DNA, 200 bp, Lawsonia intracellularis
tctaatgaaatccgtagaaaaattgctaagatataccatgctgaactgcaaaaattaaaaaatatacaattaccattagaaaaacccgatagaacacatatatatcacttatatgttatccaagtagataatagggatatgttaaaaatattcttgagtaacaaaggaattactacaggtattcactacccgcaacccgt

SEQ ID NO: 3802 - DNA, 200 bp, Lawsonia intracellularis
tcataaacaaccagcatatatcaatagacttcccctttcaccacatggactacctgaaacagataaaatttttccaaaaatattgagccttcctctctatccaggcctttctgaaaatgatatattgtatattacatcaactatacaaaaatattttgattcatcctctcggaataactaaatgaatatgtcttcaacta

SEQ ID NO: 3803 - DNA, 200 bp, Lawsonia intracellularis
aggatattcctcactcaaaaattaccccttctattacaggccttgttttaacatataatggagaaagactgcttgaacattgccttacttcacttcaattttgtaaccatatccttgtagtagattcttttagttctgatagaacaattgaaattgctaaatctcataatgtgcaatttatacaaaataaatggaatggt

SEQ ID NO: 3804 - DNA, 200 bp, Lawsonia intracellularis
cctgttgcacaatttacttatgcttttccccttataaaaacagagtggatcataaccattgatcaagatgaaatatgctcccaagcacttcaaaatactattataacagctattcaaaatgtatctcaaaatgtatgtggtttttatgtcccacgacgttcatggtattatgatcgctttcttaaatatagtggttggta

SEQ ID NO: 3805 - DNA, 200 bp, Lawsonia intracellularis
tccagactatcttcttagagtctttagaaaaaatggaatttatttttcccaacaaggtgttcatgaaaaaatacatcctcatacacataccaaaaaacttataggggatatccttcattatccatatagtagtttttatcaacacctcgaaaagattaatagttacgctcaatatggtgctgaagatttagctaaacaaa

SEQ ID NO: 3806 - DNA, 200 bp, Lawsonia intracellularis
aaaaatctggtggaatttgtatagctatttctcatggattaggacgatttatacgaatatatatcctaaaaaaaggatttcttgatggaaaagcaggttttatcaatgcaattcatggagcatattatgcatttctaaaatatatcagaataaatgaaggaacttggggagctccatataatcatcaatagcctttagag

SEQ ID NO: 3807 - DNA, 200 bp, Lawsonia intracellularis
agagttatattatgtctcaaatgacatacaaaagggtactacttaaactaagtggtgaatcacttgcaggaagacaacttactggtattgatccagatacagtggctgtactttgtaatgaactttcaagcgtaattgaattaggccttcaaatagcattagtcattggaggtggcaatatttttcgtggactatcagct

SEQ ID NO: 3808 - DNA, 200 bp, Lawsonia intracellularis
tcagcaaaaggtatggatcgttcatcagctgattatatgggaatgcttgctactgtattaaatgccttagctattcaagatacactagaaaaaaaaggacaccctacacgtgttctttctgctattgctatgcaagaagtgtgtgaaccctatgtaagacggcgtgcaatgcgtcatcttgaaaaaggaagagttattat

SEQ ID NO: 3809 - DNA, 200 bp, Lawsonia intracellularis
ttgtgctgcaggtactgggaacccatattttactacagacacagctgctgcactaagatgtatggagcttaaatgtgatgctcttattaaagcaacaagagtagatggtgtatatgacaaagatcctttaaaatttgatgacgctgaaatgttcaaacatctaacctatgaagaaacattacgtcgtcatatcaaaataa

SEQ ID NO: 3810 - DNA, 200 bp, Lawsonia intracellularis
tggattctacagctatcacattagcacaagaaaataatatccctattattgtttgcaatatgtttaatggaagcattaaacgtgctatacttggtcaaaatccaggaactactgttgaaggagaataagaaatggatacagataaagataaaatatttctagatagtcaagagcgtatggtaaaagcaattacttccctt

SEQ ID NO: 3811 - DNA, 200 bp, Lawsonia intracellularis
gaaaaagaatttacaaaacttcgtacaggaagggcttccacctctattgtagatactatcaaagttgattattatggaaccccaacacctataaatcagttagcatctattgctatccctgatagtagcagcatcactattcaaccatgggataaaactgcatttaaccctattgaaaaggctatccttaaatcagaatt

SEQ ID NO: 3812 - DNA, 200 bp, Lawsonia intracellularis
aggtcttactcctatcaatgatggaaaaattattcgtatcactttaccaccattaacagaagatcgacgcaaagatttagtaaaacttgctcgtaaatatggagaagatacaaaaattgctattagaaacattcgtcgtgatgctaatgaacaacttaaaagacttgaaaagaataagtttatatctgaagatgaattaa

SEQ ID NO: 3813 - DNA, 200 bp, Lawsonia intracellularis
agggatttactgaagatatacaaaaaatgacagataactatataaaagaagtggaaactcactgtaaaactaaagaaaaagaaattatagaaatataaaaatacttataaagttataacgctcctttcaacatatgtctaatccaataccaaaacaccttccctctcatattgctattattatggatggcaatggtcgat

SEQ ID NO: 3814 - DNA, 200 bp, Lawsonia intracellularis
gggcaaaacaacgtggtatgaatcgcacagagggtcataaacaaggtgcattaactgcaaaatcaattgtaacaacatgcagaaaaattggtatcaaatacttaaccctttatacattttctacagaaaattggggtagaccaaaagatgaaatacattttctctttcaattattggtttcatttttaaaacaagaagtt

SEQ ID NO: 3815 - DNA, 200 bp, Lawsonia intracellularis
cacttattagaagaaaacgatatttgtcttactgtatatggtgatctcacaaaactccctttactagcaaaaaaagccttacaacatgccattgcaagaactaaacattgtcaaagtatgactgtaaatttagcaattaactattctggacgcacagaattactatatgctgtaaaaaaaatgttaactgacagacttaa

SEQ ID NO: 3816 - DNA, 200 bp, Lawsonia intracellularis
cgccaacgatcttaatgaagaaatattccgcaactatctttactctaaacaacaacctgatccagatctgcttataagaacaagtggagaaaaaagattaagtaactatttaatatttcaaacagcttatagtgaacttttttttacaaatacactatggcctgacttcacagaagaagaactttatgccatcttaaaag

SEQ ID NO: 3817 - DNA, 200 bp, Lawsonia intracellularis
aatataatgaacgaaaccgcagattcgggctcacacaggagcaactacaacaatgaatcaagaaaaaaactttccaaggatcattactggcggtcttcttttacttctcctatttactatgcttatcttatcaggagtttatatttttttactaacacttctatttacactccttgcaatgtgggaattctatgccatgt

SEQ ID NO: 3818 - DNA, 200 bp, Lawsonia intracellularis
tttggcatggagatgaaggcataggaggacgtttgatctcccttcttatgggaggaatcattctcacaacaggatggcttagccaggaagcattacttcctatcattggtatttcttttatttttattacagtttacactcttatcactagttcacatagtactgctctttatttcaaacaagttggtattcttcttttt

SEQ ID NO: 3819 - DNA, 200 bp, Lawsonia intracellularis
ggtattttctatatacctatccttcttgttcctattctttggtgtacacctttggaacaattctttcttatttgtattgtagctatttctgatagtgcagcttactttgttggtcttacttatggtaaccataaaatttggcctaaaattagcccccgaaaaagtattgaaggaagcgcagcaggtcttattgcatgcat

SEQ ID NO: 3820 - DNA, 200 bp, Lawsonia intracellularis
tattatatcaagtatattaggagttattacaggtaaagcaaatatactttcatttattattctcacttctatacttgggattgtagcacaacttggtgacttttttgaatcagccctcaaacgtgctacacatcttaaagattcaggtacaattctacctgggcatggtggtattcttgatcgttcagatagtttattat

SEQ ID NO: 3821 - DNA, 200 bp, Lawsonia intracellularis
ttgtcataccaacatatgcacttttaaaaagttttattgtctacttttgaataaaatactatttttaccccttaactaatttttagttaatattactgtatggtgtagtttaatgtttacctatataacatctcttccttctcctgaatgggaaaaaagttttccaagaacaatttccattcttggttcaactggttcaa

SEQ ID NO: 3822 - DNA, 200 bp, Lawsonia intracellularis
ttgggacaaatgcactagatgttataaagtcacataaagaactctttcatattgttgcattaggtggagggaaaaacgttcaactacttgcaaaacaagcaatacaatggaaacccgactatcttgctgttcaagacgaaacttcaaaagaagctcttattcccttactaccaatcaactataaaccatctatatttgtt

SEQ ID NO: 3823 - DNA, 200 bp, Lawsonia intracellularis
ggtcagcaagggtatgtaaaacttgcctctcttcctgaagttacaacggttctttctgctcaagttggtgccgcaggacttcatggaacagttgcagcagcaaaaaacggaaaagttatttgtcttgctaataaggaaacattagtattagcaggaaaactaatcaaaaatctatgcttacaatctggagcagtcatctt

SEQ ID NO: 3824 - DNA, 200 bp, Lawsonia intracellularis
acctgttgactctgaacataatgctatcttccaagcactatacacaagaaatcctaaaactgtacaaaacattattcttactgcatctggtggaccatttagaaataaaaaatatgaatttttaaaaaatgtaacaccagaacaagctattaatcatcccaactggaaaatgggtacaaaaattagcgttgactctgcaa

SEQ ID NO: 3825 - DNA, 200 bp, Lawsonia intracellularis
caatgataaacaaaggtctagaaataatagaagcacactatctctatggattaccatcagagcaaattaaaattgtagtacacccacaatcatacgttcattcattagtagaatttacagatcactctcttatggcacaccttggtactgctgatatgcgtatgcctattgctcactgtcttgcctggcctaactatctt

SEQ ID NO: 3826 - DNA, 200 bp, Lawsonia intracellularis
aatgttggagttgaaccatttgttctttctaaaattggaaccttgacatttgaagagccagatttagattcttttccatgcattaaccttgcaagagatgctcttgttgcaggaactagtgcacagattatattaaatgctgcaaatgaagtagctgttgatgcattcctaaaaaaacaaattggatttatggatatacc

SEQ ID NO: 3827 - DNA, 200 bp, Lawsonia intracellularis
tattttgatctctaaagcattagaagctgactctacacctgaaccaacgacacttgagtcaatagaagcactggatcaacaaactcgtcatactataagtcaatggatagaggttcattaatggattttttacaaacttttgtttcacaatggaataatgcccttgcggtagttgttgtacttggtgccttaattttctt

SEQ ID NO: 3828 - DNA, 200 bp, Lawsonia intracellularis
ccatgaacttggacactttatgatggcacggatattaggtattggagttaaaacattttctttaggatttggaccaaaaattttcactataggaaaaagaaaaacaaaatacagcttatcacttattcctcttggaggatatgtatctttagcaggagaagaagatgaagatgaaaataaaaaaatagaacaatcatcac

SEQ ID NO: 3829 - DNA, 200 bp, Lawsonia intracellularis
aaataacagatgaattatttttgcctacagaaaaattttctaatcgtcccccatggcaccgattacttgttgttcttgcaggacctgttgcaaacatactccttgcttttttcatttattggggtgtatcatgggtacaaggtagtacatttctactccctattattgggacaatcacagaaaatagtcctgcagaacat

SEQ ID NO: 3830 - DNA, 200 bp, Lawsonia intracellularis
gcaggacttcttccaggagatattattacacgtgtagatgggatgcctgtttcccaatgggatcaggttgctgaatatattgctgaaagccaaggaaatgaagttactataacgctttctcgagatgataaactccttgagtttcgcttaacacctgaagaaaaatcacgtacaaatctctttggagaaaaaaagcctgc

SEQ ID NO: 3831 - DNA, 200 bp, Lawsonia intracellularis
atggttaattggtatcagtgcacaaggagatatagaaacacgtccactatcctttcttgctgcttcggttactggtttaaaaaaaacatggttttctattagttttacatgtgaaagtcttttaaaattgttccagaaagttgttccattggacagcattggtggacctattcttattgctcaactagtaggtcaacaag

SEQ ID NO: 3832 - DNA, 200 bp, Lawsonia intracellularis
caaatgctggtatcatacctttactcctcttaacagcacttataagtattaatcttggggtacttaacttactaccaatacctatccttgatggaggacatgttgtattccttctgttagagatgatattccagcgtcctattagtcccttcatcaaaactgtatctatgcgtattggtattgttcttcttcttagcctt

SEQ ID NO: 3833 - DNA, 200 bp, Lawsonia intracellularis
atggtctttgccacttggaatgatattatgaggctcgtttcatgagagatttaactctcactttaggaatttcagaacaacatcttcatatagtttttattaaagatgaagaaatacaatatataaaagaacgttctataacatctaatgggactgagatattaggacctctcatcatagagtcactggaaaaagcacag

SEQ ID NO: 3834 - DNA, 200 bp, Lawsonia intracellularis
ttttctctacaacaaatttctcgaattgcttgtattgctggaccaggaagttttactggtttaagacttgctctaaccactgctattgctatgagacgtgctttgtctattccattagcaacactgaattatctacatgtgattgcagctagcgcatgggcactcccagagctgcagaacatctcattacttcctagttt

SEQ ID NO: 3835 - DNA, 200 bp, Lawsonia intracellularis
acttagagtcattacttatgcacgtcaaaagcttttatatatacaagattttttagtaactaaaacttttcctatgccaatagcaaagccacgaatatcttctatagaagcatccattcaaacaaaagaccctatactttttatgggctcagggatacaatacaactactcgttttttgcagaacatgctcttattaatc

SEQ ID NO: 3836 - DNA, 200 bp, Lawsonia intracellularis
caaatatactattatttcaaaaaaaaatctccatttctccatatgcattacttcaactagtaaaaaacattcctcatgaagaatggaaacataatgatcctgaaccactatatcttcggcactgtgatgctgtagacaatttatcttctattagtttaaaacaaggtaaaaaccctgaagatgcttgttcaacatttaaa

SEQ ID NO: 3837 - DNA, 200 bp, Lawsonia intracellularis
aaaattgttactcaaccacctctattagttacataaaaatttttatttaatatttttttagtattttttataaaaaactagcttaaaagaaataaatgattattatttatttctgtttttagaatatatttagaactactccactatatactctttaaataaaaataatcttttttcttcctatcataactctctactat

SEQ ID NO: 3838 - DNA, 200 bp, Lawsonia intracellularis
taataactaccccaattgttcttaaagaagtaattatcctcaaagttaactcaactgaaaatttaacaattttgtgaaagaagatagtgagttaatccttactcatagtctttttaaaaatctttctagctcttttgaactaagatagttagaagaatctattgcttataataagaagaaaaaagaaatagaaaataaga

SEQ ID NO: 3839 - DNA, 200 bp, Lawsonia intracellularis
tgtattcttttcagggagagtaaaaaaactgatggtaaaacaatacctctggcagacttaactcattataaatatgctgttaatatgcctgttgggactaaagtatagtattagaactttagaggataagttaattactatcaaaaagatggtacaaaaacaacttcacctaattaatcaagaataatttcttgatgtat

SEQ ID NO: 3840 - DNA, 200 bp, Lawsonia intracellularis
ctatagtaataactttctaatcttacttaatgaaataatattttatattatttttttaactataacagactatagtctgttatagttaattccattaaactatacatttatttatcatatattgttaaataatacttactcttttatttatattatactctaactattctaaaaatgctatgaatttgaaagtattatct

SEQ ID NO: 3841 - DNA, 200 bp, Lawsonia intracellularis
ttattcagtggttgtggtgggttagatttaggtgtagaaggtggatttttagtacataaagaatgcattcatgctactagtgatactccatggatttgtttacctaaaaatagatttaatgtcatttttgctaatgatattatggcacaaagtaatgttgtctggtcttcaaatttcacaggtacatttcaactaaaatc

SEQ ID NO: 3842 - DNA, 200 bp, Lawsonia intracellularis
aatagcagacttattgaacgaaaattttcaatttcctaaagcaaatcttgtgattggaggctttccctgtcaagatttttctgttgcaggaaaaagagaaggattaaaaactcaaagaggctctttataccactgtatgactgaagtcatacaacaagtttctccagaagcattcattgctgaaaatgtatatggtttat

SEQ ID NO: 3843 - DNA, 200 bp, Lawsonia intracellularis
tttatattcctggtgtacgtgaaaaaattacatctgactttgaacaaattggatacaccgtcttttctttccttttattttcaaatgagtatggagtaccacaaataagaagacgagtattttttattggtctcaaaactgaagctcttaaaagaaaagtttctattaatgagattattcctcctaaaactcatcaaaaa

SEQ ID NO: 3844 - DNA, 200 bp, Lawsonia intracellularis
tttgtttcagtgggaacaatttttaaagatcttcaagaaccagaatatactttggataaagaacaacaaatttactcaaaaagcaaattctatggctctcaatgggaaggaaatagagaggttgatttatctttgccttcaccaacgctacgagctagtggcccagaattcagaagattatctaaggaacatggtgggaa

SEQ ID NO: 3845 - DNA, 200 bp, Lawsonia intracellularis
acatttagatgaattaaaagatggaaaaattgaacgacggttaactgttagagaatatgcaagaatccaaacatttcctgatgacttcattcttatgtttaataaaaataacgaagaaataatttcaatgacatctgcctatagacttattggaaatgctgttccaccattacttgcataccatgtaagcaaaagactag

SEQ ID NO: 3846 - DNA, 200 bp, Lawsonia intracellularis
atgagctctggtttgatattttttaattctatggtttctttttatcatctatagattaactaaaataacatagcagattatttatgtataaaccctatatagcatgtactatatagggtttatacataaattctggtgggtcgtgcgggattcgaacctgcgactctctgcttaaaaggcagatactctacctgctgagt

SEQ ID NO: 3847 - DNA, 200 bp, Lawsonia intracellularis
taacgaccctttttatgaactgggtttttatagaaactctatctaaacatgtcaacccctgacatttctaactaacttcatattttatcaataattatatatagttatatattcataataaaatttcaataaaaataaattgtaactataaaggaactaatctaaatttagcccttgagtaccagctactataacaaagt

SEQ ID NO: 3848 - DNA, 200 bp, Lawsonia intracellularis
taagatagtccccaagttacatagacagtatcacgccaagagtaaaagtctgtaaaaaatctttctaaagaaaatgaagacttctcgcctgtttttctattttttacttctataataccatttgcaagacttttagctccaataataacttgtattggaaaacctaacagatcagcatcattaaactttattccaggccg

SEQ ID NO: 3849 - DNA, 200 bp, Lawsonia intracellularis
ttcttcacgatcatctaaaaaaacctctatcccttctgataaaaaaaattgatatatttctgatgctttcataaccactgattcatctctaggatcaagattgatcaacataatttcaaatggtgctaatggaggaggaaatataataccatacttatcgttattttgttctatacatgcagcaataacacgagatacgc

SEQ ID NO: 3850 - DNA, 200 bp, Lawsonia intracellularis
ctatcccataacatcccataaccataagttgctcttctccattttcatcaagaaaaaaagcattcattgatttagaatattttgttccaagcttaaaaacatgacctacttcaattccttttgtaagagcaatttctctaccacatgaaggacaaccatctgcatctgtaataagtcgtatatcagcaaaagtaatattc

SEQ ID NO: 3851 - DNA, 200 bp, Lawsonia intracellularis
tggacatctctagctaagtcaacatgaagaatatgtttatcgggtttattagctcctacaacccaatcattataaaccattaattcatgatctgcgataataggtccagcagtaaatcctacaggtccagcaaatcctacaggagctcctgtccactgatgaacttgttcaggagttgccatagttattactgtagcatc

SEQ ID NO: 3852 - DNA, 200 bp, Lawsonia intracellularis
cagcatatttttaactttgacttcattaacctctctatcacctcttactaatactgctacaggcttattatctattgtgtataaaattgtcttgataatttgttgctcaggaatagtaagaaatgtgcttaccgctttaattgtatgttgaccaggtgtaacaacctcttccatgctcttctctaaagttaaagccttag

SEQ ID NO: 3853 - DNA, 200 bp, Lawsonia intracellularis
tttgaggaggtaaagttgctgcatgttcaatatttgctgcccaatcacattttctacaaaaggcgatagtatcttctcctgaatctgctattaccataaattcatgagaaaaatttcctcctatggaacctgaatctgcctctactgctctaaaatctaatgccatacatgtaaaaatagctttataagcatcaaacatt

SEQ ID NO: 3854 - DNA, 200 bp, Lawsonia intracellularis
gtatgataactgatatcagctccttcattatcttgatcaaaagaatatgcatctttcatgagaaattcacgagccctcataaggccaaaacgtggtcgaatttcatcacgaaactttgtctgaatttgataaacattaattggaagttgacgataagaacgaacttctcctctaagtaaatgtgttacaacttcttcatg

SEQ ID NO: 3855 - DNA, 200 bp, Lawsonia intracellularis
tgtaggtccaagacaatactctcgatcatgcctatctttaatcctaagaagttcttttccatattgatcccaacggcctgactctttccataagtcagcaggttgaaccataggcattaaaatttcttccgcacctattctattcatctcacttcttataatagatatcgctttattaagcgtctttagccccaatggta

SEQ ID NO: 3856 - DNA, 200 bp, Lawsonia intracellularis
accatgtataaatacctgaagtaagtttacgaatcattccagcacggattaataatttatgactaagcaattcagcatcaccaggtgcttcttttaatgtagggatataacactgcgaccaacgcataatgacctcaaattattataatagtttaatacaataaaaatagtatctgaaaatggatagttacttttcaaac

SEQ ID NO: 3857 - DNA, 200 bp, Lawsonia intracellularis
tgtttcttaatatgacctgaacaacaaaaaagatttattttgttatattaaatattgtgagttgaacgtcgagctcgaaaacgtttttcaataccacggacaacagcacttttgtatcgtgcccattctggtgctacaagctcttctggaagagggtcagctacgactctatgaatcacaatatctggacgtaacctata

SEQ ID NO: 3858 - DNA, 200 bp, Lawsonia intracellularis
taatgattcaacaacaagatcagaatagtctgcttcagttaatggataatagttacctgcattgaactctttttcaagtatagtatttttacaaacataaacattatggaatttgattccatgaataggtaaactatttagtctatctattgtttgcaacatatgggtaggggtttctccaggaagaccaaacataacat

SEQ ID NO: 3859 - DNA, 200 bp, Lawsonia intracellularis
gtgcacaaacttgaaggcctgcatttgcagcttgaataatagcttgttctgagcatttagaagaatgtccacgtttaatctttataagtgtttcatcatgaagactttgaacaccaaattctacccatttttctaaataaggcatttctacaattaaagataattttttatttgttaaacaatcaggtctagtacctaca

SEQ ID NO: 3860 - DNA, 200 bp, Lawsonia intracellularis
gaaatacctgcaacatcctgtaaacccttaatttgagctaagatagaagaaaatttacttaatggtccgtaggtattggaaaaagattgtaggtaggctataaaacgtatatattgattggaaatagaaaagtgtttgtgccaatagttccattgttcagttatagacataccggataaaccaaggccggatcctgagcc

SEQ ID NO: 3861 - DNA, 200 bp, Lawsonia intracellularis
agacacattacagaacacacatccaatgttggaatttgaacgctctctatttggacaagaacttccaacatctaaaggaattttctgaccacgacatccaagtcgccgacgaaaatgcattgcaagattattccatgtgttcatctttctattgacagcagaaaatttttagaacatcaagttcattagttctaattaac

SEQ ID NO: 3862 - DNA, 200 bp, Lawsonia intracellularis
tatattaattacggtgaagtgagcaagtatttatggcaaaaatattggattttattctaggagcattctccaacgatctcgccatcgaccttggtacagctaatacatgtgtttatgtaaaagggcaagggatagtccttcgtgaaccatctgttgttgcagttaaaaaggaacaccgtggtaacaacaaagttcttgct

SEQ ID NO: 3863 - DNA, 200 bp, Lawsonia intracellularis
gtaggtcaagatgcaaaaagaatgcttggacgtactccaggtaatattgaagctattcgacctatgaaagatggagttattgctgactttgaagtaacagaagctatgttacgacactttatctcaaaggtacataactctcgccgacttgtacgtcctagaattatgatctgtgtacctactggaataactcaagtaga

SEQ ID NO: 3864 - DNA, 200 bp, Lawsonia intracellularis
aaagcgtgctgtaaaagaatctgctcaaagtgcaggagcacgtgaggtctaccttattgaagaacctatggctgctgctataggtgctcatcttcctattcaagaaccaacttcaaatatggttgtagatattggaggtggaacaacagaagtagctgttatttcactctcagggattgtctattcacgttctgttcgag

SEQ ID NO: 3865 - DNA, 200 bp, Lawsonia intracellularis
ttggtggcgataaaatggatgaagctattatggcccatgtaaaaagaaaatataacctattaataggtgaatcttctgctgaagagattaaaattaaaataggttctgcacaccctatggatcctgaacaacaaatagaggtaagaggacgagatcttgtcacaggtatcccacaaaatattataattacgtctgaagaa

SEQ ID NO: 3866 - DNA, 200 bp, Lawsonia intracellularis
gtccgtaaagctatttcaggtcaggttgatagtataattcaagcagtacgtattgctcttgaacaaacacctcctgaacttgcagcagatattgtagatagagggattgtccttacaggaggaggagctctattaaaaggtttagaccaacggctacgtgaagaaacatcacttcctataactgttgttgaagatccact

SEQ ID NO: 3867 - DNA, 200 bp, Lawsonia intracellularis
ctctactgttgttgtaggtacaggacttgctttagatagtattagtttcttacgagaagtttgtattgactaaaatatctgcttatctctgtttctttatttgtaaaaattatttaccataattaaagcaggttatcataaaataaaatataaacatgtccttcacaatcatagactggaagaatgatgccccctaagcg

SEQ ID NO: 3868 - DNA, 200 bp, Lawsonia intracellularis
tttattgctcatttctgccttaattctgcttatttatttaggaggctacagttggaaccagcgtacgcacttcctagatacaatagtaactaatgtaggattagaaacttcagggtatgtcattaagtctgttttgtttgtacaagatgctattttagatgcttggaaaaaatatgtagatcttgtcaatgttcgtgaag

SEQ ID NO: 3869 - DNA, 200 bp, Lawsonia intracellularis
aaaatgacaacttaaaaaaagaactttctaaaacaaaaagagagctattccttgcatcagaggagcgagcagaactggatagactccgtgacctactgaagatttctcctcctataggttggactatacaaggaactcgtgttcttgctggaagaatgggctccaatgctgctcttgccaccatagtcattgatcgtgga

SEQ ID NO: 3870 - DNA, 200 bp, Lawsonia intracellularis
tatcttacaggggcgataccaggaacacctgtaataacacaagacggtatagttggacgtgtatttcgtgctggaccaacgacttcaactgtactccttcttatagatccaggaagtcgtattgctgttgtaagtcaaaaaaatagagtacaaggtattcttgtcggctctggagcaatgtcacctttagaggtacgttt

SEQ ID NO: 3871 - DNA, 200 bp, Lawsonia intracellularis
tgtttcacgaaatagatctatagagcctggagaacttcttgtcacttcaggcctagatgaagcttttccaaaaggtatccctgttgccaaaatatcaaaagtaactgactcagatatgtctccatttcaaacagttgaagcaacacctctagtgcctatcctaaatattgaagaattactccttcttcaacaaccagtat

SEQ ID NO: 3872 - DNA, 200 bp, Lawsonia intracellularis
accataaccaaaacttttcctctattgatgatgtacaacaaactgaaagtgtgagtgtgctaaaatgaaattccgcaatactctttggtgggtactctttttcattataagcatattattacaaaaaacattcccaggtattgatacccttgttataggactacttatatcactagaagaaagaagtcccttacaaactt

SEQ ID NO: 3873 - DNA, 200 bp, Lawsonia intracellularis
tatgggtattacttaccattattattatccaagaaggatgtggaacacttgattttggggtatcaattttatggtatagctgtgtaattggactattttttatcgggtgttggttatttgaaacaaaaaactttttattcattattctattaagtattgccataggaataacaaagttttttgttattactttaatgagt

SEQ ID NO: 3874 - DNA, 200 bp, Lawsonia intracellularis
catctacaaaaccttcctgacaatactagcttaatcattaatgaatgtatgctgcaggcactctatatccctattgcctggaaacttatttcattaacacgttcatgggtgactaaatatgaagctgaagcttgatcctgaaggttatcaaccaccaagaagtggaattttacttttacaattccttatcggagcacttt

SEQ ID NO: 3875 - DNA, 200 bp, Lawsonia intracellularis
tttttgtttttgtacttcgtttttggtacttacaaattcataaaggtacagaatttgctcggcaagcacaaaataacagacttcggaatgaacgtgtctatgcctctagaggacttattaaagataaaaatggtatattacttgctgaaaaccgtccagcttttggtcttgcattagtgagagaagactgccctgatatc

SEQ ID NO: 3876 - DNA, 200 bp, Lawsonia intracellularis
acaacaacccttgcacaagttagtgtttggatggatacaccccttgagcaactaatagcaaaatttaatcaagataaaagaaaagttaaaccatttgaaccaatcctgttgtttacagatattccttttgaacaagttgcaaaaatagaatctcagcttatgcattggccagggcttataactgtagctcactccaaacg

SEQ ID NO: 3877 - DNA, 200 bp, Lawsonia intracellularis
ctattaccctcaaagccatgaatttgcacatatacttggttatgttgctgaagctaatgaaaaagaacttgctatggataaagtactctcattaggagatactataggaaaacaaggtcttgagtatatccttgaaccacgtttaagaggagaaaaaggtgaatatagtgttgaagtggatgtactaggaagagctttag

SEQ ID NO: 3878 - DNA, 200 bp, Lawsonia intracellularis
gaaaagtattagttaaagcaccccagcatggtgaggatattcagcttagccttgatgcacaacttcaacaaaaaattgtctcattactagatacacatgctgcttgtgtcattgttatagaacctcacacaggaagactccaagcacttgttacgactccagcatatgacaacaatctttttgtacgtggactttctcaa

SEQ ID NO: 3879 - DNA, 200 bp, Lawsonia intracellularis
aaaaattgggaaatcctaagagataatccacgtcatccactacaaaataggactattcaaagtacatatcctcctgcttcaatatggaaacttcttatgataggattattccttgaagaaggtattgccccttcaactcatataacctgtacaggtagtgttactcttggagatcatatatttcgatgttggaaaaaaca

SEQ ID NO: 3880 - DNA, 200 bp, Lawsonia intracellularis
cgggcatggctctgttgatatgaagcgctctcttactgactcctgtgatgtttacttttatattcttggagaaaaacttggaattgataaaattgaaaattttgccaaagcctgtggatttggttctctcacaaaaattgatctcccttatgaaaaagtaggacttgttccttcacgctcttggaagcgtagccggtttg

SEQ ID NO: 3881 - DNA, 200 bp, Lawsonia intracellularis
gtgataattggtacaaaggggaaacactaaatacatctattggacaaggatacaccttaacaactccattacagatagctgtttttgtttcatctcttattaatggtggtaacttaatgaaaccattactgctttcagaagataaaccacaagttttagggaaaatcccattctctgaagaaacactagcttttattaat

SEQ ID NO: 3882 - DNA, 200 bp, Lawsonia intracellularis
aatactatgagacttactgttgaaaaaggcacagcaagagttctaagacgtaatgacgctatcattggtggtaaaacaggtacagctcaagttgttaagcttaaaatggttggagaacgaagactcaaagcagatgaagtaagttacatggagagagatcatgcatggattgcctcatgggggaaaaaagatgatcaaga

SEQ ID NO: 3883 - DNA, 200 bp, Lawsonia intracellularis
ggttgtcgttgttgttatgatcgaacatggtggaatggggagctcaacagctggtccaattgctcgcaaagtttatgatattcttttttcaacaaaacaagagcatagttaactctatataaggaaaattatctatatggagccaatagatcgtagactcattacacatataaactgggggttattagcctacacaggaa

SEQ ID NO: 3884 - DNA, 200 bp, Lawsonia intracellularis
tactttttttcattggaacaagtaatctttattcagcaagtggtatccgcttagaaaatggaatcacactttccccattttaccaacgtcaaattgtatggggaggatttggtttacttgccatgattgtatctatgagttttgattatagaaaactacaaagtcttgcccttcctttttttctttttacactttttctt

SEQ ID NO: 3885 - DNA, 200 bp, Lawsonia intracellularis
ctaatacttacacctattcttggaaaaactatttatggtgctaaaagatggataccacttggtttattcaacttacaacctagtgagttagcaaaactagcggttctaattatgggagcaagaatgctttcacttgatggagcacctctttcatgggctcaactaataaaaatgttaattattggagttattcctgcagg

SEQ ID NO: 3886 - DNA, 200 bp, Lawsonia intracellularis
ccttattgctctacaaccagatttagggactgcactcacagtttttgctattcttggaggcatggtttgctatcatggtcttcaacctcatgtactgcgtatttgtcttattattattccattattaattcctcttagctggtttttccttcatgattaccaaaaacaacgtattgttacttttttagatcctactaaag

SEQ ID NO: 3887 - DNA, 200 bp, Lawsonia intracellularis
atcctcgaggatctggataccacattattcaatcacagatagctattggttcaggacaattctcaggaaaaggttttcttcaaggaactcaaagccaacttcgctttttacctgagaaacatacagactttgctattgctgtatttggagaggagtggggatttttaggctgtataactcttatgggattgttttgtctt

SEQ ID NO: 3888 - DNA, 200 bp, Lawsonia intracellularis
ttcctattaggtatttttaacacagtaaaaggtgcaaaagatcgttttggaagtacattagctgccggaatttttatgtattttttctggcaattctttgttaatattggtatggttcttggtcttatgccagtagttggtattccattaccatttctaagttatggcggtagtgcaacgcttgtaaactttattttaat

SEQ ID NO: 3889 - DNA, 200 bp, Lawsonia intracellularis
aggccttgtacttaatatttcaatgcgtaggtttgtattcaaaagttattaataaaactagggtggagaatttactgtgagtaaagaagaaatcaatgcatttcttggttctggaaccacttatcaaggaaatcttattttccaaaatgctgttcgtattgatggatcctttaaaggtgaaatacaatctgaaggttcct

SEQ ID NO: 3890 - DNA, 200 bp, Lawsonia intracellularis
taatcgtaggaaaagaaggctcaatagaaggaactcttgatgttggagaactcattctcagtggcttttttatgggcgaagtccgtgcaacaagaaaagtgacagtccataaaacaggaaggcttcaaggaacactagtgtcccctgccttgattgttgaagaaggagccattattgatggtcaggttgtaatgcaatca

SEQ ID NO: 3891 - DNA, 200 bp, Lawsonia intracellularis
cctatgccagaactatctgaataatatataaaaattaaatctacttctttgacagaaaagtatctttcagctaagaatttggtaatttagataactattttcatctaaggagtattacgtgatagagcttaatattacgttactcattcaattaattaattttctaatagcccttattgggattaactatattcttgtcc

SEQ ID NO: 3892 - DNA, 200 bp, Lawsonia intracellularis
aacctattagaaatagtatataccaacgccaacaagtattctcatcaaaagaggtatacattagtgaacttacacaccaagtaaataaagaccttcttcagtatgaatttataattacaaaaactaaagaagaagctatctcctactataaacatgaacaagaaaatactgaacgtttgaaaaatactatgttaaatgaa

SEQ ID NO: 3893 - DNA, 200 bp, Lawsonia intracellularis
gcacaagaagaagcaaaaaaacaaactaaagaaacacaaattacaataatgactgaagcacaagacgcaaaacaattactagaaaaagaaatcgttccttttgctcataatattgtaacgaatttactaaagaatgtataacttctaaaaggagttactctttgaacaccttcttctcctttattctttctaaagatggt

SEQ ID NO: 3894 - DNA, 200 bp, Lawsonia intracellularis
attattacaattgcagggattatactatttagtattcttattcactttaaagatccttatcatccctggataaatcttttagggagatttggaaatcttagtatatttctttatattctctggcgtgcagcaggtaaaaaaattattcaatttttttctcaacaaaaaaacaatattattcataaacttcaaacacttga

SEQ ID NO: 3895 - DNA, 200 bp, Lawsonia intracellularis
attacaaaaaaatgaggtagaaaaaaacttagctgctatacaagcacaaatggctctccttaatgcaaaacaagaagctattcgtgaagaaagccgtattcaagccgaaaaactcaaaaaatatatgtttgatgaaacacaaaaagaaattgaacatattcataaacaaacacagcaaattatagaaacagaatcaaaag

SEQ ID NO: 3896 - DNA, 200 bp, Lawsonia intracellularis
aaatagcttataacctaagatcacaacttgcagatcaaatagtaagtaaagctgaaaaagaattaaaacatcaattggatatggctagtcacttcaaactaattgataatgctttaacaaaggtagtactctcttgattggagatatcattgcacaacgatacgctcaggctttatttgatcttgggaaagagcaaagtc

SEQ ID NO: 3897 - DNA, 200 bp, Lawsonia intracellularis
ttcatgaagtggaactgtatgatacagcactttcacaaattgaagaattacttatgacttcaaatgagttaacctattttcttcatgcccctatatttacaatatatgaaaaacaaggcgttctattaaaattattagaactaattgatgcagcacaacctatcaaaaatttttgtttgcttcttgcagagaaagaacgt

SEQ ID NO: 3898 - DNA, 200 bp, Lawsonia intracellularis
ttacctcttcttacgcaaattattaatagctttaaagtacttcttgataatgccaaaaacattgttcatggccaacttataacagctattactttagatgaaaaaaaacaatctgaacttcttatctcactagaaaaacaaacaaatagaaaacttgaattactgtttcaagtaaatcctgacattcttggtggcattgt

SEQ ID NO: 3899 - DNA, 200 bp, Lawsonia intracellularis
tcttcatattggagacaaggtttttgatgccagcctccgtactcaattagaatgtataagaaatactatcaagaaaggtgaaacgaatcatgcatattaaagccgatgagattagtacaatcatcaaagaacaaatccaaaattacagtcaacgtattgaaactacagaagtaggaacagtattatctgtaggtgatgga

SEQ ID NO: 3900 - DNA, 200 bp, Lawsonia intracellularis
attgcacgtgtatatggtgtgcaagacgtcatgtcaatggagttgttagagttccctggtaatctattaggtatggttcttaaccttgaacaagataatgttggagttgcacttcttggtgatgacacaggtgttgaagaagggtcaacagtcaaacggactggacgaatcttttctgttcctgttggagatgctgtaac

SEQ ID NO: 3901 - DNA, 200 bp, Lawsonia intracellularis
tggccgtgttcttaatccattaggtcaacctcttgatggtttaggtcctctcaatgcaactgaaaaaaagcctgtagaagtaaaagcaccaagtattattgaccgtaaaagcatttatgaaccattagttacaggaattaaagccattgatgcaatgactcctattggccgtggacaacgtgaacttattattggtgacc

SEQ ID NO: 3902 - DNA, 200 bp, Lawsonia intracellularis
gccaaacaggaaaaacatctatttgtattgatgctattcttgcccaaaaagagtctggagtacactgtttttatgtagctattggacaaaaagcttcaacagttgcacttgttgcagacacactacgtaaacatggtgcaatggaatatacaactatcattgctgcaacagcctctgatcctgcacctttacaatatatt

SEQ ID NO: 3903 - DNA, 200 bp, Lawsonia intracellularis
tccccatattcaggttgtacaatggcagagtattatagagatcatggacaacatgctttaattgtatatgatgatctatcaaaacaagctgtagcttatcgacaaatgtctcttttacttcgccgtccaccaggacgtgaagcttttcctggtgatgttttctatcttcactctagacttcttgaacgggcagctaagct

SEQ ID NO: 3904 - DNA, 200 bp, Lawsonia intracellularis
tagcgatgaacttggtggaggttcacttacagcacttcctatcattgaaactcaagctggagatgtttctgcatatattccaacaaatgtcatttctattactgatggacaagtatatctagagccaaatttatttaatgctggtgtgcgtccagcaattaacgtcggtctctcagtatcccgcgttggtggtgcagctc

SEQ ID NO: 3905 - DNA, 200 bp, Lawsonia intracellularis
aaacaaaagcaatgaaacaagtttcaggtacaatgcgtcttgatcttgctcaatatagagaactagcagcttttgcacaattcagttcagatcttgacaaagaaacacaaacaaaacttgaacgtggtgcacggcttgtagaactattaaaacaaccacaatatcagcccatgcaacttcctgaacaagtaatcgttatg

SEQ ID NO: 3906 - DNA, 200 bp, Lawsonia intracellularis
tttgctgcaacaaaaggctttatggatgatatacctattgatcacatccaaaattttagcaaaacacttattgaatatatacaaactatgaatccaaagattcttgagaatatctccacccaacaggcactaaacgaagagttagatcaacagcttacaacagcaattacagaatgcaaaaaaacctttttacctatgaa

SEQ ID NO: 3907 - DNA, 200 bp, Lawsonia intracellularis
taaaaggtaattatatggcatcactgaaagacgtaaaaataaaaattgctggtgttcgtaaaacaaaacaaatcacaaaagctatgaatatggttgcatctgcaaaacttcgtggtgctcaaataaaaatagaacactttcgtccttatgcagaaaaatttcaagacgtcattagtaatcttgcaactcgttcagatgaa

SEQ ID NO: 3908 - DNA, 200 bp, Lawsonia intracellularis
acagtgcataaacttcttgaaaaacggactaatggtacatcctgtatttttattcttataacatctgatcgtggcctttgtggtatttttaataccatgcttattataaaagcacttgaacttgcaaaacaaaaaacaacaaaagggaaaaaagttagttttatctgtattggaagaaaaggaagagatgctatcaaaaa

SEQ ID NO: 3909 - DNA, 200 bp, Lawsonia intracellularis
aacacactatcctattctttcagattatagtgataaattcacacgtgactatcaacttgcatctcacataagtgaaaaagtgattgatggttatctaactgtcaatatggatgaagtagtacttatctatggacagtttattaatgcaatgagacaaattgtaggtttctctactttattaccaatccatccaaaaccat

SEQ ID NO: 3910 - DNA, 200 bp, Lawsonia intracellularis
tagataaagaacaactagaaaaatatagtgaatatatctacgagccaggagtagcaatacttttatcagaattactaccaaaatttgtaactactcaaatctatagaggattcctggacacagatgcaagtgaaaatgctgcaagaatgacagctatggataatgctacacgaaactgcgatgaattaataggaaattta

SEQ ID NO: 3911 - DNA, 200 bp, Lawsonia intracellularis
acacgtctctataataaaacacgccaagcatcaattacaagtgaacttattgatattgtaagtggtgcagaagctctgaaataaaaggcaagggagcatctaaggtcatgagtgaaaatatcggaaaaattgttcaagtaattggagctgttgtagatgtaagttttccaaatggaaaacttcctcctattcttactgca

SEQ ID NO: 3912 - DNA, 200 bp, Lawsonia intracellularis
ttagaaatacataatcctaatagtattgatgctccaaaacttatttgtgaagttgcccaacaccttggtgatgatatagtcagaacaattgccatggatgcaacagaaggccttaaacgtgggatggatgttttagatactggccatcctattatggcccctgtaggaaaagcttcccttggccgtattatgaatgttgt

SEQ ID NO: 3913 - DNA, 200 bp, Lawsonia intracellularis
tggtcagccaattgatggacttggagttattgatacaaaaacataccttcctattcatagaaaaccaccaagttttctagatcaaaatacatcagttgaaccacttgaaacaggaatcaaagttattgaccttcttgtccctttcccaaaaggtgggaaaatgggactctttgggggtgctggagttggtaaaacagtta

SEQ ID NO: 3914 - DNA, 200 bp, Lawsonia intracellularis
ttttaatggaaatgattaacaacattgctagacaacatggaggaatttctgtctttgctggggttggagaacgaacaagagaaggaaatgatctttatcatgaaatgaaagaagctggggtacttgaaaaagctatattagtatatggccaaatgaatgagcctccaggagcacgttcacgtgttgctttaactgcatta

SEQ ID NO: 3915 - DNA, 200 bp, Lawsonia intracellularis
acttgtgctgaatacttccgtgatgaagaacatcaagatgtccttctttttattgataatatctttcgttttatccaagctggatcagaagtttcagcactacttggtcgaatgccctctgctgttggttatcagcctaccttgggcactgatcttggatctcttgaagaacgcattacatctacacataatggatcaat

SEQ ID NO: 3916 - DNA, 200 bp, Lawsonia intracellularis
aacctctgtccaagctgtgtatgttcctgctgacgacttaacagatcctgcgcctgcaacaacgttttcgcaccttgatggtacgcttgtattatctcgtcaaattgcagaactaggtatttatccagctgtagatcccctagattcaacatcacgtattcttgaaccaaactttgttggggaagaacactatacagttg

SEQ ID NO: 3917 - DNA, 200 bp, Lawsonia intracellularis
ctcgtggcgtacaaaaaatacttcaaaaatataaagaactccaggatattattgctatattaggtatggatgaattgtctgatgaagacaaactagttgtaagtcgtgcaagacgtattcagcgttttctgtcacaaccatttcatgttgcagaaactttcactggaacagcaggagaatatgtaaagcttgaagatacc

SEQ ID NO: 3918 - DNA, 200 bp, Lawsonia intracellularis
attaaaggttttaaaggtattcttgcaggagaatacgatcatctctctgaaagtgacttttatatggttggtaatattgattctgccgtagctaaatatgaaaaacgaaaagaatcaaaataggagttaacacatggagcaatcactccatcttgaaattatctccccagatcataccattgttagtgatcgagttacat

SEQ ID NO: 3919 - DNA, 200 bp, Lawsonia intracellularis
atgttaacttacctggagttaatggtgaactaggtatcttaccaggacacatccctttaatggctgcattagacattggaaaacttcactatcaacaagattcaaaaaattattatgtttttatttccgctggatttgctgaagtctctaataataaagtaacagttcttactgaagctgcagaaaaagccagtgaaatt

SEQ ID NO: 3920 - DNA, 200 bp, Lawsonia intracellularis
gatgtggctcgtgcacaagcagctaaagagcgtgctaaagctcgtctcttaaaagctgaagaagatattgatatggcacgagcagaagctgctatgcatcgtgctattatacgattaaatatttccagcctttagtaacaaaaggacttttataatttactaagtaaatatagtacaattaatttaagatagtatatttt

SEQ ID NO: 3921 - DNA, 200 bp, Lawsonia intracellularis
atatagcaaacatgaaaaaacattttttctatataaaaagactttctattatattagcacaggataaaatatggctgaaatcttaagtgttcaagagctaacatataaaataaaatatgctgttgagacactattaccctatgtttgggttaaaggagaagtaacaaactactcctgcccaacatctggtcatatttact

SEQ ID NO: 3922 - DNA, 200 bp, Lawsonia intracellularis
tttctttaaaagacaacgagtcatatctccattgtgtttggtttaactctatgcagcgagagacagaaacatttgatcctcttacaggagaagtctttcaaaatggtcctcgtttatcccttgctaaaacaattactaatggtcaaaaaattatttgtgctgggacaattggtgtctatccacctaaaggtggctatcaa

SEQ ID NO: 3923 - DNA, 200 bp, Lawsonia intracellularis
ctacttgtagactttgctcagtcagaaggagttggagaatggtatagtgctttagaaaaacgtaaaaatgaattacaacaacaaggatattttgatcttagtaggaaacaaataattccacataatcctaaaaaaattgttgttattacatctccagctggtgcagctattcaagacttcctacgtatagctaaagagcg

SEQ ID NO: 3924 - DNA, 200 bp, Lawsonia intracellularis
aggaacagaaaagtatattcgtatttatcctgtcacagtacaaggagaagaatctatccatcaaatagcccaagctattcatacagaaaataattccaactgggctgaagttattgttcttatacgtggaggaggagcttctcaagatcttatggtatttaatgatcaacagttaatagatgctatctacacatcaaaaa

SEQ ID NO: 3925 - DNA, 200 bp, Lawsonia intracellularis
ttcctatacttgcaggtattggacatgagtctgatatctcttttgctgaacttaccgctgatcttagagctgcaacaccaagtcatgctgcacaattactatggtcagaacgaacacagttaaaacaacaagtacatgatatggaaatagcacttactaaagctgctcattttcaattacagaaaattcaatatgtattc

SEQ ID NO: 3926 - DNA, 200 bp, Lawsonia intracellularis
aataaattgaatactaccttacaatggctttcacctttaaaaaaacttgaacgtaatgagttacagcttaactctatctatgaaaaactaaatgctatctttaattacaaattgaaattaaaaaatcttgaccttatacaatatacacaactcccctcatattctattgtaaaaaaaatatcatattataaagaacaact

SEQ ID NO: 3927 - DNA, 200 bp, Lawsonia intracellularis
atcttttttacaaagaaaactttataggtatatccattcaattttattaacaaaaaaacaaaatactaataataacaaacaattactaataaataatttctttcaaaaatatcaacaactactatataactatgaaaaacttcatgttactcttaaaatgttaaaccctcatcttttactaaagagaggttatgccctta

SEQ ID NO: 3928 - DNA, 200 bp, Lawsonia intracellularis
tatatcttcctaatggtcaaatccttcatagtatacaagaagctccagagcaaacaatacttacaataaaacttcctgatggattactctctgtgaaagttatttcagcatgatactaaattggagtataatatattatgagatacttgcaacaacatgtttactatatattattttttctcctacctttttgtatagtt

SEQ ID NO: 3929 - DNA, 200 bp, Lawsonia intracellularis
acaaaagtttcagcaaactcgtcacttcaaattcaaatccctaataaagtccaacaaggaactgctattttagtctctgttatttctcctattcctgagtcaaatgctatcttcctatggcttaataaaagtataactgtcccatttaaaaagaaaggacgacattgggaagcgcaaacactccttcctatcactgttga

SEQ ID NO: 3930 - DNA, 200 bp, Lawsonia intracellularis
tatggcaaaaagtgaaatcttagctgttcgaacaagtaataactatattcaacaatctatccatatagaacctgttcactggccaaaacaatatattagtctagggaaaaagaaacaaaagtttgttactccatctaaaaagcttgtagctcgccttgagcatgaacgtaaaatgataaaagaagctttatcaaatatat

SEQ ID NO: 3931 - DNA, 200 bp, Lawsonia intracellularis
cctgtaagcaatactggtcaaaaccttttgtacgaccagttaaaggaatcattacaagcccatttggaggtcagcgtatatttaatgggaaaccttgctcatatcatcaaggtgtagacttacgtggtgccataggtacaccaataaaagctatggctgcaggtaaagtcaccctttcagcagacttatattattttggt

SEQ ID NO: 3932 - DNA, 200 bp, Lawsonia intracellularis
aaagctgttttcattgatcatggacaaggtatttatactctctatggtcatatgtcacgacgtgacgtccaagtaggagatatgatcaaggcaggccaaaaaataggtcttgtaggagcaacaggaagaacaacagggccacatctccactttggattaaaaattcttggacacccagttgatcctatatcactctttcc

SEQ ID NO: 3933 - DNA, 200 bp, Lawsonia intracellularis
tgaataatgatatggtatagttatgacagtaaaaaagcatccatcaaataaaaaaaatgagtgtagttttgaagaagctcttcagcgattacaggaaattgttaataaacttgaagatgcaactcttccacttgaaataagcattcagctttataaagaaggtattacactatctcgtctatgtaaaacacagttagaaa

SEQ ID NO: 3934 - DNA, 200 bp, Lawsonia intracellularis
aagcacagcatgaagtaaaaattctcactgatgatgggacatttgaaccttttgaactgcctaatctaaactttgttggagatattgaatgaactttctccatcacaactatcaaagtatattaaaacaacgtgttacacttattgaagattttcttaaaacatgtattcaagaaaataatatctcttctacccttcaac

SEQ ID NO: 3935 - DNA, 200 bp, Lawsonia intracellularis
acgctatgaactatagtttacttgcaggaggaaaaagactaagagctgtattatgtatttcttcagcagcactttttgatcttagccctacctctattttaccttttgctgctggcattgaaatgatacatacttactcactaattcatgacgatttgcctgcaatggatgatgatgattttcgtagaggtaagccttct

SEQ ID NO: 3936 - DNA, 200 bp, Lawsonia intracellularis
tgtcataaagcctttaatgaagctttagctattcttgcaggggacgcactattaacagatgcttttaccttcatgagtacattaaactctatagtaccatctaacaatatattagttgccattcatgaaatagctcaagcagctggaagtaatggaatggtaaaaggacagtcgatggatatagagcatactggtgtatc

SEQ ID NO: 3937 - DNA, 200 bp, Lawsonia intracellularis
cgatgtgtcttttaatacactatgcataatacatgaatataaaactggagccctatttcgtgcatcatgtactacaggcgctatgttagctggagcaaatgaatctgcaatttatgctttaaaatgttatggggaagcactaggtgcagctttccaaataactgatgatatcctaaatgttactgcagatagtataaccc

SEQ ID NO: 3938 - DNA, 200 bp, Lawsonia intracellularis
ttggaaaaccaactagaagtgatcaggaaaaagggaaaataacatatccttccctactaggacttgaaaaaagtaaaaaattagctgaagaaaaaatacatcttgcaatatctagtctagatacttttactggcgatgaagttttatttcttaaagaggttgcaaatagtcttttaacaagaactcactaatttttgttt

SEQ ID NO: 3939 - DNA, 200 bp, Lawsonia intracellularis
tttattaaaacatcactatataaaaaataatcaatagactagaagaaaatcttaaaggttttatatgacacaccctcctgacactatagtaaaatctatcctttctcatatatcaaacccttgtgatatacaaaaactatcccttcaagataaactcactctagcagaagaactccgtagtattattataaaaactgtct

SEQ ID NO: 3940 - DNA, 200 bp, Lawsonia intracellularis
ctaataatgggggccatctcgctccctctcttggagtaattgaattaaccctagctctgttagctacatttaatcctgcagaagataaactgctatgggatgttggccatcaaacatatgcttggaaactgcttacaggccgtgcacataacttttctacgttacgtaaattaaatggtctcagtggatttcctaagata

SEQ ID NO: 3941 - DNA, 200 bp, Lawsonia intracellularis
acagaaagccaatatgatcactttggtgcagggcatgcagcaacatctatttctgcagctcttggtatggctatggctagagacctacaaggccttaaacatcatgttattgctattattggagatggatccttaacagctggtatggcttttgaaggcctcaaccaagctggtgctatgggaagaagactcattgtagt

SEQ ID NO: 3942 - DNA, 200 bp, Lawsonia intracellularis
tctgaatgataatgaaatgtctatctccaagaatgttggtgctctttcactttttctcagtagaaatatggagcgaggttgggtaagaagagttcgccatgaaattaaagattggcttaaatcaattcctagtattggtgacgaagtagcagaatatgctagtcgtactcacaggagtcttaaaacagtttttacaccag

SEQ ID NO: 3943 - DNA, 200 bp, Lawsonia intracellularis
gtattctttttgaagcatttcgtttcaactatattggtccagtgaatggacatgatatagaatcaattgaaaaacatttagctatggcagcttctatcgacgatcagcctgtcctcctccatgttcttaccaaaaaaggaaaaggttatgaaccagcagaaaaaaatcctgctagttatcatggattaggagcctttgat

SEQ ID NO: 3944 - DNA, 200 bp, Lawsonia intracellularis
atccaaactggaattcctaaatcaaattctcaaaattcaccacctacgtatactgaagtttttgggaaaacactttgtgaacttgcagaaaaagataaacgtattgttactattactgcagccatggccagtggtactgggacatcactatttaaagcaaaatttcccactcactttactgacgtaggtatatgtgaaca

SEQ ID NO: 3945 - DNA, 200 bp, Lawsonia intracellularis
gcatgctgtaacctttgctgctggattagcatctcaaggatataaaccatttgttgctatttattctacttttgctcagcgtgcttatgatcaaattatacatgatgtctgtatccaaaagctaccagtcactttctgccttgatcgtgcagggattgttggtgaagatggagctactcatcatggagcttttgatatat

SEQ ID NO: 3946 - DNA, 200 bp, Lawsonia intracellularis
cctttctaagatgtataccaaatatttcaattttagctcctcgagatgaagcagaactccaatctgctatttacacagcactctcttttaatagtccattggctatacgttatcctaaaggtaatggtgtaggagtaactttacctaatgagtcaactcctcttccttttgaaggagaattattaaaagaagggcatgat

SEQ ID NO: 3947 - DNA, 200 bp, Lawsonia intracellularis
gctattatcatagctataggaagtatggttatgcctgcgtatagtgcagcacaacaacttcaagaagagaaaaatctttctattgctgtttttgacagtcgatggatttctccattgcctcaacaccaacttattgaattagctaatacatttaacaatattcttttaatagaagaaaatgctcttgctggaggattttc

SEQ ID NO: 3948 - DNA, 200 bp, Lawsonia intracellularis
ttctgctgttgtagaactttttgcagacaaccaatgtctccatggtcaacgtatacaacgaataggtatacctaattactttattgatcatggttctcaaaaagagctcaaacaatgtttattgctaaccgttgatggaatcaaaaaaatgcttttacaaatgttacaaccagaataacaatagtaataaattcaagtta

SEQ ID NO: 3949 - DNA, 200 bp, Lawsonia intracellularis
ctatgtattctttatagttgctgtaaaaataactttatcttgttctaattttactaaaacatttccaggaaattgaaaaaatttttttctttcacctttcattaatgtattatctaataaaaataaggtgcttgctcgaccttgaccaatattaagtctacggatagcttcaatatacacacgaagtcttaaagattttg

SEQ ID NO: 3950 - DNA, 200 bp, Lawsonia intracellularis
gtaaagttattaattctgatcttggtatccaaaaatattctggtgaaccttctatcttggaaaaaacatctgtaatcattttatcccaaaactcttcatcctccttagctaatgaccatagcatatgagcaacattggaaaattttggattttcctcttcaaataatggtaaaatagtatgccgaattctatttctttta

SEQ ID NO: 3951 - DNA, 200 bp, Lawsonia intracellularis
aacgttatatccttattggaattgtcctctacccaactaatattttgtgaggaaagaaaagatactaacaatgttcgccgagtagtaagtaatggccgtagtaaataacgctttttatccactgctttcattcctgcaagacctggccaaccagtcccacgcaataatcggagtaatatatcttctgacaagtcatttaa

SEQ ID NO: 3952 - DNA, 200 bp, Lawsonia intracellularis
atgatgacctgtagctatccactgtgcaccatattctttccttacttgttctaaaaaacaataccgttcttgtcttgccgtttcctcaataccttttttatattttattgctaacccagaaatatcaactctagaaataatacaacggcgatctaatgcagcagcaaaagacttaacatgattagcatcatctttgctct

SEQ ID NO: 3953 - DNA, 200 bp, Lawsonia intracellularis
ctgctcgtaactggtgatccatatgtgcaaagacgacatctatacctaaacaatgtaatattaatgcaagagccatggagtctactccaccagaacaaccaacaataacagtaccctgtatattctgagaaagattttcttccaaaaatcttttaatggataaacaaagacgagcatgttctgaagggagatcctgaaga

SEQ ID NO: 3954 - DNA, 200 bp, Lawsonia intracellularis
gaagtaggaagtttcctatgtatcatctttatatctctcttataaaaacaattattttattagataaaatatctagaatatatttaatagatatctcataaaaaattattccttgccagcactgaatatttaagataaacaccttcatctattggagaggtgtccgagatggcctaaggagcacgattggaaatcgtgtg

SEQ ID NO: 3955 - DNA, 200 bp, Lawsonia intracellularis
tgcgctaatcccgcaccgggagttcgaatctccccctctccgccatcttctttaaaatagaactttttttacatcttatttcctagtacaagtaggtttaacaccccagcaattgtgggctttctaaggtttttccagcattagacttgtgctcactttctccatttgccattttaccaaaaaaaatatcccttttatcc

SEQ ID NO: 3956 - DNA, 200 bp, Lawsonia intracellularis
tctccatctccgatacatgcaaacactcctgtcgaaagtatacctattctcaatgctttgttttgcctaattttaagaggagtactgtttcttaaaccttcagtttagagagcagaaaacagagtaacaagcaagatacaaaacaatcatttattgcatctcaacaaagccttaactataagctaacttatttgaattac

SEQ ID NO: 3957 - DNA, 200 bp, Lawsonia intracellularis
attaataacggaaggtaaattttgatgatttatggtatctgttacaaacaattcagcaaatcctgcttggcttattctatctatgcagtcttcagaaaatatagcataggtaatacaagcgcctacttagttttcaccactttatattaatatcttcaatgtgttacatagagtatagccaacactatctactaatctca

SEQ ID NO: 3958 - DNA, 200 bp, Lawsonia intracellularis
tctacaataatgcaatctttctcagtgatatcgcctatcatatttgacataatacacttcccatcagagttacatgccttgttaatcattgaaagaccagtcccagacttcaaggccaacatcatggctcttagcaagccaccaacatcaggggatgcaacaatacaattattacttacctgaaattcattatcaaaaag

SEQ ID NO: 3959 - DNA, 200 bp, Lawsonia intracellularis
atctgttggatcaaaattcttaaccccaattttaaaaaacctttggattgttttgagtacatatctacgtagccactttgtcgatgctgctagtttcaataagcctcacaactaaacttgctgatatcaggccatattcttatgatggcctatttgcttacctagccgaaatatggaattctaataactactattaaaac

SEQ ID NO: 3960 - DNA, 200 bp, Lawsonia intracellularis
cgtctctttttgccgtatctgcagtaataacagctccatcagatgatcatttacaggtctagttgagcagatctagttgagattattgtataattacatctctgccatattgatccttgtttacttaaactttcaactcttgatcaacaagcttcttagtgttgacaataatagtcgcatccaagtttacctgttaccta

SEQ ID NO: 3961 - DNA, 200 bp, Lawsonia intracellularis
cttaaaaaggattgaatggctgcttcgcctaggattatcataacttacctccatgtataatatccgcaaattctcttgctttatcttcgaatacacctaccccggaggtttcaagtattgaaaccagtttactccctataatcacaccatcagcaatttgactcacgtatctggcctggtctatggatgatatgccaaat

SEQ ID NO: 3962 - DNA, 200 bp, Lawsonia intracellularis
cctactgctatttttgtattaggtaaggccttacataaactatacaactcctcttctaaagtattcgataaatcttgttggatacctgttacagaaagtcttgagatataataaataaaacttggctggagcgttatataaatcggtagccttgctagatctgttgtgggcgatacaagcaacacaatttctaacccaac

SEQ ID NO: 3963 - DNA, 200 bp, Lawsonia intracellularis
ctcttgaagcatagcataaaaatcctctccttcttctggaggaaggtctataattagcactccatttaccccagctgctttagcttggtgaagaaatttatcgtagccgaaagccaagataggattaaggtaagtaaaaagtatgattggcgttttgcaacccatcccccttattacttgtacttgttttaatacttcac

SEQ ID NO: 3964 - DNA, 200 bp, Lawsonia intracellularis
caaagttcataccatttcccatagctacctcagcggctctttgatttacagggccatcagcaataggatcagaaaatggcaccccaagctctattatgtcagcaccagctcgtgcaagggccataatagcttttgttgacacttctaaattagggtgtccacccataataaatgggataaatatagacttgtagttgtca

SEQ ID NO: 3965 - DNA, 200 bp, Lawsonia intracellularis
aatgctgcttttatcatttttatcctcctaataggttgctaaggtttctacatccttatcccctctaccagaaaggactatgagcattatgtaactttgcggtaaaaatggagctactttaatagcataagctatagcatgcgcactttctaatgctggaataattccctctagctttgcaagtgtaaaagccgcattca

SEQ ID NO: 3966 - DNA, 200 bp, Lawsonia intracellularis
aggcttcttggtctgttgcataagtatattgaacacgttctatatcatgcaaataagcatgttccggccctacacttgggtaatcaagtcctgccgaaatgctatgcgtattactaacattcccatggtcgtcttgcaaaagatagctcttagtcccttgtaacacacctggtttgccaccattaaatctggccgcatgc

SEQ ID NO: 3967 - DNA, 200 bp, Lawsonia intracellularis
tctccaagacacagactaataccaccagcttcaactccagtcatttttacttgcaaatcttgtaaaaatggatgaaatagacctatagaattactacctccaccaacacatgcaactaattcatctggtaactcatcaatcatttccaatagttgcttccttgcttcaattccgatgattctttgaaaatctcgcactat

SEQ ID NO: 3968 - DNA, 200 bp, Lawsonia intracellularis
tgtaggataaggatgtggacctagtgctgaccctagaacatagtagctatctttaatattgctaacccaatcgcgcattgcttcagatgttgcatccttaagagtttgagaaccattatgcactgcctgcacttccgcccccaatatttgcatccgtactacattaaggtgctgccgctccatatcaatagctcccatat

SEQ ID NO: 3969 - DNA, 200 bp, Lawsonia intracellularis
aaacaacacattccataccaagtagacttgctatggttgcagttgcaacgccatgttgccctgcgccagtttctgctatcaacctacgctttcccatgtgttttgcaagtaacccttggccaaccgtattattgattttatgcgcacctgtgtgagtcaaatcctctctctttagatatattgttgcaccaccaaggtgc

SEQ ID NO: 3970 - DNA, 200 bp, Lawsonia intracellularis
tgtgttagacgttttgcaaagtatagtggcgttggccttcctacaaagtgagtgagcaaatcttgtagttcttgcttaaaagctacttcgtgttgaagctttagatacgcagcttccaattctgcaagtggcgctattaatgtctcaggagcataagcaccaccatattcaccgaagtatccttttttatttgacatttt

SEQ ID NO: 3971 - DNA, 200 bp, Lawsonia intracellularis
tacacctcattaaaaattcttttatagctagcggatttttgattccaggccgttcttcaaccccacttgctacatcaaccgcaaatggttgcacatgttttattgctgcatcaacattcaaattatttaatccaccggctaaaataagcttgtagtcggtaagttctctggccaagtcccaattagcaagcctaccagta

SEQ ID NO: 3972 - DNA, 200 bp, Lawsonia intracellularis
ccaccaagtaaaccatcttgtcgttttggggcatcaagtaatataaacccatactcttgtaatattgaagattcaggtaactcatctttagatgatgcttgcaaggctagtatgattcgctttttatccaaaggtaatttgaaatgtagttgatatatttggatcagatcaagaaactctaaagcatctaacatctcatc

SEQ ID NO: 3973 - DNA, 200 bp, Lawsonia intracellularis
ttgagaataatcgatcaaaattcctacttttataacatgtattggtaattgcgaagtaatttctcttgctttttccaatgaaacataacgtggggaatttttataaaaattaaatccaatcgcccatgcgccattgtttgctgcaaacaatgcatcttctagattagtgattccacaaattttagcttttattacacacc

SEQ ID NO: 3974 - DNA, 200 bp, Lawsonia intracellularis
tcagatatcaatttttgtagttcgactccaggattctcatatttcatcaaggacgaaccaattagaaatccatcaaatccaatatccatcatctctcgaatttgagtggcattatctatcccactttcacatatagcataacaatcatttggtatatactttatcaagttccaagcggtatccaaactgatttctaatgt

SEQ ID NO: 3975 - DNA, 200 bp, Lawsonia intracellularis
ttgtaaattccgattattaatcccaataatttgaggagaaagctgcaaagcttgttctaactcaaaaccatcatgcacttctataatcggtgtaaggcctaaatctaaagaataatcataaagctcttttaataaatctttattcaagaaggccacaataagcaatacggcattagcaccatataaaagcccttgtgcaa

SEQ ID NO: 3976 - DNA, 200 bp, Lawsonia intracellularis
tctgttttttgcttaaaacaaagtctttgagtaatatataagaattaagatgagcacctctgatatctttaatgaaagatatgctgccttggaaatagtcaggttcagctaatactgaaagagcagcagcacctgaattaagataatctccggcaatatcgacatggtttagtttaccttgatatatctgcccacaagaa

SEQ ID NO: 3977 - DNA, 200 bp, Lawsonia intracellularis
ggacttgaaaattttacctcactaataatgataggttttgaagaggtggtgaatatcttgcagaaatctagtgtatttggcatttctacgaggctatcaggcattaattcaactcttcttgtaacatgtgacctaattttttctaaaaaatttacgctcaaattgaacctctcattttatttaataaggtagtaactttc

SEQ ID NO: 3978 - DNA, 200 bp, Lawsonia intracellularis
ccctgttctattgcgtctttagtaagcaatataccttctgcaatactagaagattttccagcaacatataatccagctgcagcattgagaagtacaatatctaacttaggaccattaattgtaccagataatatgtcacaaataagggttgcatttttggcagcatcccctcctcttacatcagaaagttgtgctttaga

SEQ ID NO: 3979 - DNA, 200 bp, Lawsonia intracellularis
aaaaccaaaatcctcaggattgaggctatattcttttatatctgtaccattaagctcaattatatgagtgttactgcttatactgaactcatctaagccatcatctgaatgtacaactagcgcatgattaaccccttgagttgctagtacttctgctactttttgtactaaatcccttcgatatacacctatgacacatc

SEQ ID NO: 3980 - DNA, 200 bp, Lawsonia intracellularis
tttttggtcgcataggattaagcaaagggcctagtatattaaaaatggttgggaatccaagtttttgacgcaatgctccatattttttaagttccttattaaataaaggagcccataaatatgtgtagtttatctgttgcaaactttttaaactttcttccacagtctgagctattcggatacctagagcttgtataaca

SEQ ID NO: 3981 - DNA, 200 bp, Lawsonia intracellularis
tcctggcttccaactttgcttgtagcactcctgccaccatgttttgcaaccataatgccgcagcttgcaattacaaagcttgcagctgtagagatattaaatgtgcccttactatcgcctccagtgccaacaatatctacaacttcaaggtcatgtgttatcttggctgaatgcttgctaaaatattgcaatgcaccaag

SEQ ID NO: 3982 - DNA, 200 bp, Lawsonia intracellularis
tgtttcttcagctgtttcttttttagcttggagcaatgttaaaacagcagactgtttttctggttcatattcagcaaattcagtaaataactcataagcttcttcctgagttaaattttttaagtgtaataattttttcatcatgttaccttctgcatttggttatattctggctttaaatacaaagacctttccataat

SEQ ID NO: 3983 - DNA, 200 bp, Lawsonia intracellularis
gaattgaatttgctcaatacaagactcaatattgcggagtgaaatatacaacggattcacacataggcgtattaaatctggcgcgcggtaatcacagataaaccctgcatctataagtgcacgcgagaatgcatatccatgcttatgcatgaaagcaacatgcccacctctattttgtggagcatagacttctataccat

SEQ ID NO: 3984 - DNA, 200 bp, Lawsonia intracellularis
gactctttaatgattttataaggatattactatattccttggctatagaataagatttaactattacctccttatcaaatatttccaaggcagcttctaaggctttcatacttaatatagcaggagttccgctcataaactttcgtacaccaaaagaggtgtattctttttcaaaagaaaatggctgattatgtcctatc

SEQ ID NO: 3985 - DNA, 200 bp, Lawsonia intracellularis
cacccttgaatcgggctttgcatgtgttcatgatacattctatttgcatatataaatgctgggcttccagggcctccgcttagatatttatatgtacaacctacggcaaaatcagtgctactttcttctaaatccactggaactatccctatgctgtgagacaagtcccatacggttagaacaccatatttgtgtgcata

SEQ ID NO: 3986 - DNA, 200 bp, Lawsonia intracellularis
ttcattaattgttttcatgtctaacacagaagagtctctgtaattaacatgagttaacataagtactgccactgtctcatctatatttttgtatatttcattagattttatatactttacctcagatatcccttgtgcaatatataaatcagctgggaaattatcatcagtagtgagaataatgttacgtccattttgta

SEQ ID NO: 3987 - DNA, 200 bp, Lawsonia intracellularis
gactcatagctacttttaatgccttaaaaagatttagcactgtagaatcacatacaataacctcatcaaattttgcacctacaagtgcagctattttggctcctaacgcatatgataaatcaatccaaccacttttattccaactactaaccccatatgaagcaaaatcttgtagcgtgctacaaactgcatctgaagtt

SEQ ID NO: 3988 - DNA, 200 bp, Lawsonia intracellularis
gttttaaggctgggccctaaagaatgtccacacatataaactttgcattcaggtaaaataaacttatctactaacatctttacttccctttttgtatagcaagcacaatcaacactatacttcctgtaaagaattttaagtctgatggagcaaggcccaaagatagagctactccctgaatttgttgataaataagtgat

SEQ ID NO: 3989 - DNA, 200 bp, Lawsonia intracellularis
ccaatgataggagctgctaactgctttggtatcgtgctattacccactattgattctccaatcatcaggctggccaagccatggatcactataccaactcccatacctatatccatgaattgctgcatctgcaccattaagctgcctgcaagaccaaacatagacccagcaatgaataaacctaggcttgtatacttatt

SEQ ID NO: 3990 - DNA, 200 bp, Lawsonia intracellularis
tatactaatcttatggtttatagcgaatttaggattgctacctactgttcgaaaacgtaggccaaaatcagtgtgtaaaaataaggcaaaaggtacaatacaaaacataccaacaataatcagcgatataaaatcaaaatgtatgccatccatatcaaacaatgctatatttggcttgcccataatcctaagattaatgc

SEQ ID NO: 3991 - DNA, 200 bp, Lawsonia intracellularis
tataagccatggtactgagtataattccagcaagtaaactattaaccttcagtcttaaagcaacttgcgatgtgcccactgccagtaatcctccagccataataccagccatcatagctaatatttgcggcatatttgcaaccattaagcttgcacataccgcccctccaagtgggtaagctccttctgctgttaaatct

SEQ ID NO: 3992 - DNA, 200 bp, Lawsonia intracellularis
ggaaaattgaggaaacgaaatggaatcataataccaaaggcaataattgctaatattaacccttgtaatactccggtgtagagaagctcaattgacatttccacctccagatactagaagctgatcttcatattgatggaacatcgtaagcaacccctgcacagtcatggccttcttttgagccccatgaatgtctaaca

SEQ ID NO: 3993 - DNA, 200 bp, Lawsonia intracellularis
ctattttgccttggtggagcataataaggcgattaccatattttatagcatcatccattttatgcgtgatcattatagtagtgagtccatgatttatagcttgttgatgagtatattccataagcaaagtttgcattttaggatcaagcgctgatgtatgctcatctaacagcaaaatttgtcgaccagaaatgattgcc

SEQ ID NO: 3994 - DNA, 200 bp, Lawsonia intracellularis
attagggttgcaatcatctgcctttgtccaccagataacatttttagaggttgattgatataatcctccaaaccaccatctaactcttttagtttttgaaggatttgatctttatatcttttataaaacaacaattttggttttattatttcacttaaagcaatattctcaagcagtgtcatttcaggcacagtgcctaa

SEQ ID NO: 3995 - DNA, 200 bp, Lawsonia intracellularis
atttacatcttgtacaacttgtgccacgtcaccacttagctttattgcaccagaatcagcctgatattctgagcttatcaacttaagtaaagtagatttaccgcatccgttagccccaataaaaacacaaaaatctccacgttctaaatatagacttatatcatttattacaggcctaaaaagtcctgggaatgactttg

SEQ ID NO: 3996 - DNA, 200 bp, Lawsonia intracellularis
taacttttataatattaatcataagtcactccacaatttctatattagaaggaatggcaatacctaattctattgcaagttttttattgatcacgccatggtgatcctgagcacttgggtaaattggtactaattcgctaattttttccccatgtaatatcgcacttactaattttcctgtatttctaccaaccgcatag

SEQ ID NO: 3997 - DNA, 200 bp, Lawsonia intracellularis
taatctaccccaagaccagctattaccaatccatctcgcacagcttgaatatcagcattgaacactggtatacgcattttgtgtgcttctactgcaattgctggtagtgttggctgtattggcccgcttacgcctacatatattagatctactttacctttaaatccttgcatcctaataggcacctctcttgcttgttc

SEQ ID NO: 3998 - DNA, 200 bp, Lawsonia intracellularis
aactggtatggcaacaacagacatgtcgtactctgaagctgctgattgcatcatcttcaccaatgaggtgtcattgctatcagaagttgcatataataaacctatgcttttagcgttaggtaataaaaattttgcaaactgaagtaggctgttaaggtcttgcatatcagaactacccgtcatattatcatctgatttat

SEQ ID NO: 3999 - DNA, 200 bp, Lawsonia intracellularis
tgtactcttggagtaaaccaacacctacaggatctgtgactgagctataaattaaaggaaggtttttgattttacctttagcaaattgggcaatgggggtagatatcactaccatagcttttgggtgatgagctcttaggcttgctattgtttgtggtatgagagcgtgatcaaagccgacatctgcaatttcatagcgg

SEQ ID NO: 4000 - DNA, 200 bp, Lawsonia intracellularis
atagtttggttctcggtaaagccttctacttgcatctgctctttgaaaccagctataacagcatcaagcgatgtatgtggcccataattagctattgctacaacaggcagcttattgtttaccttattattataagtaataaatgctattactaaagttataactacagcaataaaatagaagaaatttttcttcatgtg

SEQ ID NO: 4001 - DNA, 200 bp, Lawsonia intracellularis
tactccatgtcaatatttgagttttatagatgaaggtgcattagattaattctaatgcagctcaattacatataagaaagtaactattaaatatattggccgaacggccatgacatagagaaaatagaggatgattgagatagatattctaaaatgagggataacatgttataaaccatagaataaaaaattgacaacgt

SEQ ID NO: 4002 - DNA, 200 bp, Lawsonia intracellularis
aacgcccacaaacaacttagcgccaacgccatcgcccaactatcaaattttttattactaagtttaacaacattgtttttgttccattataaaataaatttataataaaaattataattaaactaaaatgaacgaactgtcaagcacataatatttttttagtgtgtaatgatagccactctgtttaaattaacttacaa

SEQ ID NO: 4003 - DNA, 200 bp, Lawsonia intracellularis
ctaaataatttgctttgttcatgccaaagatttggaatgttttacatgagatcggaaggtttcatatggcagggttgatgccctaaaggaatagcttttttaagttttagtacaaggaaattaaacctgaaaatcagctgtatatatttagctgtgactttatttgcatcacataaatctacatgatttgatatttaccc

SEQ ID NO: 4004 - DNA, 200 bp, Lawsonia intracellularis
aatttaagctgacgctgccatagttgaacatagatttgactattatgatataatagccggattctgagtcgttaattgagtttagcctttaggcaccagtaccactttctactaccttacttttaagatgaatgggcatgaatactgataattcattttaccatagatatacctctattccttcatgcagtaataaactc

SEQ ID NO: 4005 - DNA, 200 bp, Lawsonia intracellularis
tgtagcctatctgtatagatgtgtacaccaatgccatcctatcacataaaaactgttttgagcagcaaacaaatggtgcaatattgcttaatgagaaagagcaaatcctaaatcacgtcaacctactgcaacattacaaaggcttcatctatggagtttatcccttcagagactttatagcagtaacttcagggcattca

SEQ ID NO: 4006 - DNA, 200 bp, Lawsonia intracellularis
ataagctgccgtacatggttttatgatgagaaatacagcttttgccatgtaaaatggttgatgaaggtataataacaataaagtttatccttctttttggtgtaggttagtgtcatggacacatcacaaacctaacaacgacttctttgttaataagataatgacatttgaaagattttcacaactccggctagatcatg

SEQ ID NO: 4007 - DNA, 200 bp, Lawsonia intracellularis
attgatgcagatatataacaacaaatacgatatcggagcttgatgcttgaaaacagcaaatttggttctctactttctaattactcaggaataaatccttacaaagtcgcaagtcaatctttgatatgaggggagttataggccacaggaatgtttgcttgatgcagttttttcataaccacacaggcaatttcgataga

SEQ ID NO: 4008 - DNA, 200 bp, Lawsonia intracellularis
ttctagttcttagtttgatatgatgtaagcttaatatatctctaccttttattatttattataccgataaattattgtggtaaactgatctaccccaatctgactttattatatcataccaatttatatcagtgttcattttcttacttacaatcatctcgactaagcacaaaaaatataataagataacattagacatt

SEQ ID NO: 4009 - DNA, 200 bp, Lawsonia intracellularis
gtgctaactatttctataataaatattttaactactttactaaatatagtatcatagtattaatcttacctatagttattattatgaatatgataaaacactgcttaatacttattatttttttagtaactacattacatacccatctatatgctcaccaggcaaataggactatacttattacagcatccactggtgct

SEQ ID NO: 4010 - DNA, 200 bp, Lawsonia intracellularis
attggagaagctatatctactctactagcttcagaaggatataacttagttattgctggtagaaatagcaataaacttataacccttcaaaaaaaattacaaacaaagcataaagatatttctgttcaaacagttattattgatttttcaaatattgaatctatagaaactgctgtaaaccaagttcaacagcttcatgg

SEQ ID NO: 4011 - DNA, 200 bp, Lawsonia intracellularis
tattgttctcattggtccaagaccatctttaaagaaagaagatatccctagtaaagaagaatggaataaagcatttaatgaaacttttattaatccacttgaagtacttcgacattttaacccaaaaatagcagataaaagtagcatagttattatttcaggtaatacttctaaaaactatttcccacaatttcctaata

SEQ ID NO: 4012 - DNA, 200 bp, Lawsonia intracellularis
caaatgttatacgtgttgcttgggttgctgaagtaaaaaatcttatatacttttttgcaaaacgacatatccgtgtaaatcttgtctctcctggaattatcttaacagaacatcataaaaaagttatccaacaaaaagcaataacacataacatatcttttaaagaacaacttaccagagaggtctcttctattcctcta

SEQ ID NO: 4013 - DNA, 200 bp, Lawsonia intracellularis
aaaacatatggaacaactgaagatgttgctcaactagtatcatttttactttccaataaatctaaacacttgaatggagcaaatattacccttgatggtggagaagctacttcttattaaatcaataatacagtacgttactcttttcgcctttaatatattagtattaatgacatatggtctgaactttttctaatcca

SEQ ID NO: 4014 - DNA, 200 bp, Lawsonia intracellularis
atcttctggaataaaagatcatcttgttctggttgtggtccatcagttgtaagaagtcttcctccataaaatatagagtttgcccctcccataaagcatagcgtttgtaattcatcagacatttgttcacgtcctgctgcaagtcgaatataagattttggcatcaaaattcttgtaagagctattattcttacaaaatc

SEQ ID NO: 4015 - DNA, 200 bp, Lawsonia intracellularis
aaatggatcaatatcactttgagggttaagaggtgtacctgcaactttgacaaacctattaatagggacagattcaggctgttcttctaatgttgcaagtaatagcaacatggagatacgatcatcaatagtttcacctaaccctattataccaccagaacaaagtttaataccaaattttcttacagcctttaatgtag

SEQ ID NO: 4016 - DNA, 200 bp, Lawsonia intracellularis
caagacgatcatcaaaggtatgtgttgtagcaatgtgctcataaaactcaggtgatgtattcatattatggttataaaaatcaagccctgccttttttagcatagcaatttgatgttcttttaaaaaacctaaggttacgcatgtctctaaacctaatttttttacttcttcaatcatctgacagacaattttcaaatcc

SEQ ID NO: 4017 - DNA, 200 bp, Lawsonia intracellularis
ttatctaaaggactacgccaagcagctcccatacaaaaccgagtactaccaagttcttttgctttttttgcttctgaaattaaagtatcaatatccactaaaggttctttttgaagatcagttttatagtgagaagattgagaacaataaccacaattttctggacagttgcctgtttttatgttcaaaagcatactaat

SEQ ID NO: 4018 - DNA, 200 bp, Lawsonia intracellularis
ctgaatcttattaggatcaaaatattttctatgtattgtttgagctttatataaaagttcaagcaaaggaagattaaaaatttgctttgcttctttaaatgtccaatcattacgcataataaaaaataaccccattattaaaaaaacaaaaatgtattacagatataaacaatatatatctcatcttcatgatacaaaaa

SEQ ID NO: 4019 - DNA, 200 bp, Lawsonia intracellularis
aatatcgtagcttaccagtcattcataaaaattacaaaaaagatatccttgatttttctacaaatgactatctacaattagcttatcaccctaaccttattaatgctgcaattatgacaggtagtacctatggagtaggatccacaggctctagacttctttcaggaaataatgaactatttgaacgtctagaaactact

SEQ ID NO: 4020 - DNA, 200 bp, Lawsonia intracellularis
attgcacaagataaacatactgaaacagctatgctgtttatatctggttttcaaacaaatgtaagtgtattatcagcattattagatcaccatgtattaaaaatgcaacctcttgtattttttgataagttaaaccatgcaagcctctatcaagctgtttttttaagtaaagctgaacttcttcgttattatcacaataa

SEQ ID NO: 4021 - DNA, 200 bp, Lawsonia intracellularis
tatggaacacctatcatcccttttaaaaaaatataaagatgataatagacctaaatttattgttacagaaacactctttggcatggatggagacatagcaccccttacagatattgtttcactttcatcgcaatatcaaacatttttgtacttagacgaagctcatgctacaggtcttacaggtattcatggatatggcc

SEQ ID NO: 4022 - DNA, 200 bp, Lawsonia intracellularis
tatcaacaacagtaaatctcagtcatataccacatatagttatgggtacttttagtaaagcacttggatgtagtggcggatacatagcttgtaagcaacttattaaggattacctaataaataaagctactggctttatttattccacagcaggctctcctatggttttaggagcagcacaagaagcatggaatcttata

SEQ ID NO: 4023 - DNA, 200 bp, Lawsonia intracellularis
agaacactagataaccaacgtgcacacctcaactctttaagtaaagaattacgagatgggtgtaaccaactaggatttaatataggaactagttcttcacatattattcctcttattttaggctcagaagaagatgcatctcatgttcataagaaacttttagaacaccatatccttacctcttatatcagacctccaac

SEQ ID NO: 4024 - DNA, 200 bp, Lawsonia intracellularis
tgttcctccaaagacgtctcgtattcgtattgctcttaatgttggtcataataaagcagatatagagcgtctactacaactactttcgaccttatgaaaaaatattttatattttgtcacggctttggttataataaaaacttttggaagccgcttttacccttttttactaatgaaaaatgtttagtattagatctagg

SEQ ID NO: 4025 - DNA, 200 bp, Lawsonia intracellularis
ctattatggaaatcattctttattaacaagtgatattagaaataaaaaactcataggtattggacattcattaggtttattaaaacttttacaattaagtataaactttgagtatcttattggattaaacagctttataaactttcttggtaatgatactcaactagctctaacaagaaaaactgaactccaaaggttga

SEQ ID NO: 4026 - DNA, 200 bp, Lawsonia intracellularis
ccaaacattttctcgtctctcccctaaaaactctatataactttcacaaacgatgtggtgtacctattaaaaaaaatatattaactacctttaatttttatacattatatgaagatcttacactcctttcatctttatcaacaatcccatataatcaaaaaggacttattataggctctcaaaatgatcctattgttcct

SEQ ID NO: 4027 - DNA, 200 bp, Lawsonia intracellularis
ccgcagctcatctatgataattttaaaatatatcctaatatgactataaaaataatacctagtggtggacatggactaggatttctatatcctcaaaggatatatcaatatattaaagacgttttaatgtagaataaaaattaattaggtaatgataaaacaaaaaatacaatccagcttcgacgttgctagtgatactt

SEQ ID NO: 4028 - DNA, 200 bp, Lawsonia intracellularis
atgacacagtagcccatatccaaaaagaaagtgcatatattttagtaaaaaatctacataatacaatatctacattctatcctaaaacaattttagacttaggaactggtacaggttatatccccgagatattattatcatattatccttatgcttcttttatgcttaatgatattgctccaaaaatgattaataaggtt

SEQ ID NO: 4029 - DNA, 200 bp, Lawsonia intracellularis
caacaaaaatttaataaaactagcaatatttccttttacataggagatatggaatctatacaaattaaaccatatgatcttattatcagtaactttgcatttcaatggatcgaaaaattagaaactatgctaaaaaagttatataataattcaaaagtattagcattttcttgtttacttgatggtacatttaaagaatg

SEQ ID NO: 4030 - DNA, 200 bp, Lawsonia intracellularis
gaaacaaatcttacaatcttataatatcccatcacccttaaaacaatatccacaacaaccagtattgtataaatgtatatcagcacttggtagtaccactcattaccttgaaacaaaatgttttcagctaccatttactggtgcacgttcttttgtaaactatttaaagcaccttggtgcagctgtaagtaataaacctc

SEQ ID NO: 4031 - DNA, 200 bp, Lawsonia intracellularis
ttcccacccaaaaagtaaaaaatcttattacaaactataatgaatcatttcatgtaacatacaatgttttttttggaatcatggagagaaaatagtgcaattttttattataggaactgatacaaatgtcggaaaaacaatagtgtcaagttggttatgcctgcatacagcatatgactactttaaaatgatacaaacag

SEQ ID NO: 4032 - DNA, 200 bp, Lawsonia intracellularis
gatcaattaatggtaccgacagtgatatattaaaaaaattgacatacagtaaaatacataaagaagcttactgttataaagaaccactatctccacacttagctgcaaagcttgaacaagacgaaatcaacattaataatattatactaccaaatgcttctaatctagttattgaaggtgcaggaggactacttgttcct

SEQ ID NO: 4033 - DNA, 200 bp, Lawsonia intracellularis
attaatcagcaatatttgcttcttgatatcattagttaccttatgttacctgttatactagtcacacattcacggctaggtacaattaaccatacactccttacattacaagcactcaaatcaaaagggatagaggtagtaggagtaattgtaaatggtaagcctaaccaagataactgtgatgcaataacttggtatgg

SEQ ID NO: 4034 - DNA, 200 bp, Lawsonia intracellularis
caaaacaacaatacttgctcaatttcccttcttatctacaataacaaaaacaactttaagaaacattccattaacacaagaactaaaacaactctttatagtataacatatgctttcccttacagaacgtgataaaaaaattatatggcatccgtttacacaagaaaaaactgcagatccagttataagtattagtcatg

SEQ ID NO: 4035 - DNA, 200 bp, Lawsonia intracellularis
ctaagggttcatatgtttttgatgaaaacggaacagcttatcttgattgtatttctagttggtgggttaatcttcatggccattcacatccagatattgcacaagctatctatgaacaagcactaaaacttgaacatattatttttgcaaaatttactcattcccctgcagtagaattgtgtgaacaacttacatccatt

SEQ ID NO: 4036 - DNA, 200 bp, Lawsonia intracellularis
cttccactaacattaacaaaatgcttcttttcagataatggttcaacttcagtagaaattgcattaaaaatggcataccaatattggtataacaaaaaacatcctgaaaaaacactctttttaagttttgaaggtgcttatcatggagatacatttggtacaatgtctataggaagctcaggctttcataacattttttc

SEQ ID NO: 4037 - DNA, 200 bp, Lawsonia intracellularis
atcattttttttcaatgtattacgtattccatacccagatacctgggatggagataatgaaatagaaaaaaaagaagcacatgcactccatgtcttagataaatacttattggaatataaaaacacaattgcagctattgttattgaaccacttatccaagctgcaagaggtatgagaatatgcagacctgcatttttaa

SEQ ID NO: 4038 - DNA, 200 bp, Lawsonia intracellularis
actccattattaaaaaagttcgtaatgcaggaatattagttatttttgatgaagttatgacagggtttggaagaacaggaacctactttgcttttgaaaagctagatgtaattcctgactttttatgtctttcaaaaggactcacaggtggatttttacctcttgcacttactatcacaactgacgaaatttacaatgca

SEQ ID NO: 4039 - DNA, 200 bp, Lawsonia intracellularis
tttttacatgaagaatggaaatatgctcttgctcatggacattctttcactgcaaatcctttaggttgtgcagcagcacttgcttcattaaaactattattacatgaaaaaacgacattagctatgcagtccatccaccaggcacacatagatggcatctcatttttacaaaaatcctgttcaaatgtaaccaaaacacg

SEQ ID NO: 4040 - DNA, 200 bp, Lawsonia intracellularis
tgtattaggtactattagcgcctttgaacttcatgatactactcatattaaacagatagaatcctcttttttagctaatggattactattaagaccacttcataatgttatttatataattccaccatattcaacaaattataaggaattaatggatgcttataacaaaatatgtaaaattttataaggaaagtcaggta

SEQ ID NO: 4041 - DNA, 200 bp, Lawsonia intracellularis
agaactaaaattacaatttttgtctgatttctcttattctatcactattatattccttactgtataataactttacttgtcttatctagcttacttaaaatttcaactaaatcatcttgtgcaaaggcaatacaaccatctgttcctaaaaatccttcccttgccacatgaataaaaatagcactacctttactaggaat

SEQ ID NO: 4042 - DNA, 200 bp, Lawsonia intracellularis
aggtggactatcattataacctacaactataataagatcataaacatcgtcatctctatataatttttcatgacttattgaattgttaaaacatgttaaatcaacaaatttattatactgaatagatgttggatcatcacaccacccatcattcttttttatttttctactaggtaatcctgtttttatgttatttccta

SEQ ID NO: 4043 - DNA, 200 bp, Lawsonia intracellularis
ttttatcctctctaaaaaatactttacgcaatggaaactttcctaaaggagtagatttatctccttctaccttacagtttgaagtaccatttttacctatactacacttatatgttttttcatctaatgttgcttggcaaatattatctttataaactatatataaatcatgagcatttgcatgaactattaaaataaac

SEQ ID NO: 4044 - DNA, 200 bp, Lawsonia intracellularis
aatattaatagagtatgaaataactttagcataattaagatctttattataattatatattaataaatcaatataaataatattaataaaaaaatataaatatagaaaacattaattttttttttagaatagatatattgtctatctataacttactaagtatagtataaaattttattattagctatttataatcttta

SEQ ID NO: 4045 - DNA, 200 bp, Lawsonia intracellularis
gtaaattaaaataataatattatattcgataggtcaattatggagtattctatagttatattataactctatataataagtaaaaaattatatagtattaatactacattatgtaactaaaacattacgtagtacttcatatattctaatacccaactccaactacttattaatgacaactatactcttttcagtgagtt

SEQ ID NO: 4046 - DNA, 200 bp, Lawsonia intracellularis
tactaagtaagctcaaggagatcttatttagaaaccttacattctgtaagcaaataatgctggttagctaaacgaataaaaactgcacttcctttccctaggacagttggactatcttataaccaactacaataagcaaattaaaaaatcatcatgtctatgtataaagtttattagcatatatatcttagttctatata

SEQ ID NO: 4047 - DNA, 200 bp, Lawsonia intracellularis
tttattataatatttagcttaagaagcttcacatcaaacattataaaactgtaatttacgtgtatgtaaaactgtctttaatataggatagactttattttatctaaaaaatttatgtaatggaaatgttcctaaaggagtatattcatcttcttctattttttttacttgaagtactattcttacaaagactacgtata

SEQ ID NO: 4048 - DNA, 200 bp, Lawsonia intracellularis
tactttttaccatataacgatgaaaaacaagaatcattattataaaatatttcaatatattgttctacaacagtagaaaaacataatcagaatagaaaataaaaatactatacttttttactataaattatctcttaactatattattagtccttatagagagttatagtatacctaactatatactaaatatctttagt

SEQ ID NO: 4049 - DNA, 200 bp, Lawsonia intracellularis
gaagatacgttttagttatttaattaataaggtaaaataaatataaaaaggtacaaaaagttgagaatagtaatggagcgggagacgggatttgaacccgcgacttcaaccttggcaaggttgcactctaccactgagttactcccgcagatggaggcggcatccggatttgaaccggagaataaaggttttgcagacct

SEQ ID NO: 4050 - DNA, 200 bp, Lawsonia intracellularis
ctgccttaccgcttggctatgccgccatagtattttataaaaagcaagtagggcaaaaatgttattgtttactacacataataagccaacttaaaataacaaatagagataacgtctctattcctatgttaccttatgatactagcgtagatatattcatagccagctgaaacatatgtctatccaagttcaatgtcaag

SEQ ID NO: 4051 - DNA, 200 bp, Lawsonia intracellularis
attattgtgtgaatattataaatgagatcagatataaagtaatagctattaacaaaaaatgcttgcttaaaaactctagatcttctatgtccaaattaagaataatgaataaatatataagagaaaaatgaataggtaaatgacatggtagagaaacaaaaacgagatagttttacatctaaaatcggtatactggcagc

SEQ ID NO: 4052 - DNA, 200 bp, Lawsonia intracellularis
aacgcttggatctgcagtcggattaggaaatatatggaaatttccaactgtaataggacaaaatggaggagcatcatttcttcttatctatattattgcaactattgttgcaggtcttccaattatgattgctgaaattgctattggccgctctactcgagcaaatgctgtagaaggattcaaaaaactttcttcaggtt

SEQ ID NO: 4053 - DNA, 200 bp, Lawsonia intracellularis
attggtggttagttggatttgcaggtacactctctactgtctttgtccttggtttttatacagaagtagcaggctggatatatgcttatatttttaaagctgcaaatggctctataaatacaacacaacctgttgttgcaggatacatttttcaagaacttcttagtaacccatggcaaacactattatggcaatggctt

SEQ ID NO: 4054 - DNA, 200 bp, Lawsonia intracellularis
gtaattattcttgttgctacgatagttttacgaggtgcatcaaaaggtattgaaaaagctgcaactatcctgatgccgattctctttatcctacttatcattatatgtatccgtagtataacactacccaacgcaatagaaggactacgtttcctttttatgcctgacttctcaaaaatagatggtagagttattttact

SEQ ID NO: 4055 - DNA, 200 bp, Lawsonia intracellularis
tgcaatgggccttgcattttttaaactctcaattggaatgggtgtgatgctaacctatggtagctacttcaaagatgatgttaatattccttatatggctacaaaagttatgctattagatctagttgtatcacttctctcagggatagctatcttcccagtagtattttcttttggctttgaaccaagctctggaccag

SEQ ID NO: 4056 - DNA, 200 bp, Lawsonia intracellularis
gattactttttataactatccctgcagtatttgattcaatgcctgctggacagatttttacaggagccttttttatccttgcagcagttgcatctacaggagctatgctctcactttttgaaacacctgtagcttgggcaatcgacacttttaatctttccagaaaaaatactacaattattattatgttattctttata

SEQ ID NO: 4057 - DNA, 200 bp, Lawsonia intracellularis
gcctttggagcacctgttgcactttctgaaaacatattaaaacacataacaatctttgggatgaatttctttcagctttatgattttctttcctccaatatccttatgccattaggaggctttttcctctgtatctttgtaggatatgtttggaacaaacaaatggtaatgcatgctatttcaaatggagggactttaca

SEQ ID NO: 4058 - DNA, 200 bp, Lawsonia intracellularis
taatcaaggtcttatcaaacttcttttgtttcaatgtagatatgttactcctgttattattcttataattatgctacatgggttcaatttatttgcatatatatttaattaaatgtacagaaataaccaagtaaaaatattcttatagcttaaaaagaatatttttacttggttttgctattttaacttacttattaagt

SEQ ID NO: 4059 - DNA, 200 bp, Lawsonia intracellularis
aaactataaaaaaatcagctttccatagttaatggtattactccactgaatatttacagaattaataccaatagaagcccaatgctttttaagcatacctgcatgcccataaaaaaaacctttacaaaaagatggtaaacaaacagaagatggagattgaccaatttgttttactttctcataaataagatgaaataatg

SEQ ID NO: 4060 - DNA, 200 bp, Lawsonia intracellularis
cttccccctgaatcatacttcctaatgcaggatgtcttggccctgctaaaatggaagcttccaatgtatcttcaggggctaaacttaaccgaataacagggatctttttagaccacgcccttactaatcccttgcccaatatttttactgttgtattaatatcccatggctgatataagccctttctccatatatcagca

SEQ ID NO: 4061 - DNA, 200 bp, Lawsonia intracellularis
agttgtgtaccatcaacaactaaacatggataaaaccttaagcatgcaggattttgttccaaagattgttcaacgtcattaagaaaaacttctgctgtacttccaggcattccaggaagtaattggattcctaacctaagaccagcagataatatgttataacatccttctttaataatatgttgtgtataaccacgccg

SEQ ID NO: 4062 - DNA, 200 bp, Lawsonia intracellularis
tacaagacttaatgctatatttgaaaaactttgtactccaagttcaataagattgatacctgcagctttaagtttagtaagtattgctgggcttactgcatctggtctagtagaacatcttgcaccagatataagcccttctgcaagacactgctttaccatatttaaacatagttgcatgctagctgtaggtagtaatg

SEQ ID NO: 4063 - DNA, 200 bp, Lawsonia intracellularis
tgaatgttccaccataaaaagcaatctcaggaagtaatttttcactagaaaatgtatttttttcttttttcaagcgagtaaaaaggttggcaaggttatcagaaagagatatcttgcttcctccatatcctaagcctgtttgtttatcttgagcacagaatatacatcgatgtggacatccttcaaatggtaaaaaaata

SEQ ID NO: 4064 - DNA, 200 bp, Lawsonia intracellularis
ggtataatacgattatactttttttcccctaatactccaagttggaaggaatatgtttttatattagtatacatacaaatatagctccaagcatatattaatagtatatcctaattataactaggtataaagagaacatttatgagtatgtcaaatcaaacagattgcattttttgtaatatcatacaaaaaaaaatacc

SEQ ID NO: 4065 - DNA, 200 bp, Lawsonia intracellularis
ctgtgtttccatttataactctgataactttattgcattgttagatataaatcctgtgaataaaggacatacacttattgttccaacacaacatgtagaaacaatgtttgatatagacccatcactagggacagatttgcttagtattatgcaacatattggccctgccattatgaaagcgacaaatgctgagggagtca

SEQ ID NO: 4066 - DNA, 200 bp, Lawsonia intracellularis
atgtaatacaaaataactatgtggctgctggtcaagaagttcctcatcttcactggcatattataccacgctttataggagattcacgtatacgctgggaaaaaggaaaatataaaaatcatcaagaaatgatagatattgctacaaatattaattccataatttataatgattattcataagcaatatcctatttattg

SEQ ID NO: 4067 - DNA, 200 bp, Lawsonia intracellularis
tcatacaatcattcttctatcaattcaacttctagcctactctttctggagaagatatgaacaatgtactaactaaagtagatatcattgatgctatttatgaaaaaataaataacaacaaagctgatattaaaaatattgtagaaactctgttatctatcatgaaacaagccattaaaacagataatacattacttatt

SEQ ID NO: 4068 - DNA, 200 bp, Lawsonia intracellularis
agtggttttgggaaatttgaagcttatagtaaacatacccgtaaaggtagaaatccacaaacagatgaagctattactctaccatctaggaaagtcattgtttttcgattgtcaaaaaaatttcgtacagaacttaataaactgtagcattctatttgtaagaatagaagaagtataataaatacattataattcaaaaa

SEQ ID NO: 4069 - DNA, 200 bp, Lawsonia intracellularis
taactagatttaattaataaactataaaataactatgtaagtttgtagctttccaagctaaaaaggagggtttgatatttcataatttttattaactagctttttttaatgctacaaaaaatcgtttttcacctcctatagaatatgggtatgttgtttggatataccaacaactatctatattcttaggaatatcattt

SEQ ID NO: 4070 - DNA, 200 bp, Lawsonia intracellularis
aaaagtagaacaataactcctttaaaagatatctttttttctattaacttaagaagagcctgccatggcataaaggcacggcttacaattaatgcaacatcagacaaacagtttgctaacataaattcctctacacgaccacaataaacatatgtttgtgtaagaggatattgtgctaatagtgttttaagaaaaattgc

SEQ ID NO: 4071 - DNA, 200 bp, Lawsonia intracellularis
acgtttttctcgagactccacaagccagtaagaaccttctttccatataattctaagagggataccaggtagaccagcaccagaaccaaaatcccaacaaagaggatctgtaggtagacttagggaacgaataaatattgccagatgaaaactatctataataagatttgaacatattgttttccaagttgtaaatccta

SEQ ID NO: 4072 - DNA, 200 bp, Lawsonia intracellularis
caaggttcataaccttattccatttcgtcaataaacaaagataacctcttaatgattcaatctcttgatctgaaagggaaaaacctaactgtaaacaatactgtcttatttctgttaatggaactaaagaactgattggcaaaaaactattcctttatctatctaatatttttacttaacaaagtacaacatgtaaccac

SEQ ID NO: 4073 - DNA, 200 bp, Lawsonia intracellularis
tatttgagtagtactgataagataatactatattataaaattattgtttaattattattagaaaatagcttattatgacttttaaaaaacttaatagaaatatagattattaatatatcttattgattctttaactaaccctataacaaaataataatttatccatgtcaaaatctactagtcattatttagatacagta

SEQ ID NO: 4074 - DNA, 200 bp, Lawsonia intracellularis
ctaaaactctattcagaacttttaatagctaactgaagagctttttcaagctgttctgatgtgtatacatcacgaaggactaaaggctgatttgctttttcaccagatgggaatatggctgtcacaggaatacttacactacctaaagctcttaataatgcttcagcttcactatgcttatttgttaaatcgacttttat

SEQ ID NO: 4075 - DNA, 200 bp, Lawsonia intracellularis
aagctttataccatactcattaaccaactgttcaagaaaagatgttgttaatactgttttttcaagtagtttacatgttggacaccaatctgctgtaaactctacaagcattggagttaaaccaagttctttcctaaactttgtatcagaatatgacagccaatgtgctttttcagcaggatgaaaactccaccacacag

SEQ ID NO: 4076 - DNA, 200 bp, Lawsonia intracellularis
acattgcaatcatacaactaactactacccctacaaccactctttgagtactagatacagaaagtccacccaaaactccccaacaccatacagcaaaagctgctattagaagagttactattgcttgaattaacattgtttctggtaaaatagaaagtaaataaatagtggtacctaaaaggaaaaagcctacaagttgt

SEQ ID NO: 4077 - DNA, 200 bp, Lawsonia intracellularis
tcaagagttccacaccatgcaccaggtctaggtaaaaatcgaatggcttgaggcttaaaggcaaaaataatgtatggaagagacatacctagccctgtagctaaaaatacaataaatattatataaaatggctgtaacacagcccaacctagaacaccccctaacaaaggaccactacaaggagttgcaagcaaggttgt

SEQ ID NO: 4078 - DNA, 200 bp, Lawsonia intracellularis
cataacacctgtaaaataggcctgaatacgtggaaaacttgttgtttctattttgaaatcaataataggaagtgtaaaaaaaccaaagagagacaatgctaaaataaaaacaataagcattaaaccataaacaactggtacactttgaaaaaagccaccccatgctaattcaagaacttccacacctaatgctaacataa

SEQ ID NO: 4079 - DNA, 200 bp, Lawsonia intracellularis
caaaccaactgagaattccagctgcaaataataaattttgctccctaacataacggaaacaatgctctcctttatacccaagatgagaaagaataaaagaaaactttagtgttaaaacaggaagcacacatggcataatatttaaaataagtcctgcaaggaatccaaaaagtagtgcaagctcaatacgtgtaggttca

SEQ ID NO: 4080 - DNA, 200 bp, Lawsonia intracellularis
agcccagactgaaaataacgaggatgcaaatcccatgggaaaagactttctgcaatatctgttgtttgttctgtagagtctatcaagtgttctgattctgctgtatgaacaacaggatttgtatataatagatatgtatcctcccatggaacttcatcaatactaggtaaagggttaggaagtgtaattggaatagtacg

SEQ ID NO: 4081 - DNA, 200 bp, Lawsonia intracellularis
attaacaggcatacaatgtttagaagaacataataataaagataactgtacttctgactcaggcgttaatgcatctctctgcacctgcaaaaaaatagggaattcgccactataaactttctttatgcttataccagaagaaacatcttcatggatttctccttcaggataaaaaattctactctgaaggatagttcctg

SEQ ID NO: 4082 - DNA, 200 bp, Lawsonia intracellularis
atgaattttgaaggacaacttttgttggaagtccttctttttcattatgagtgtatgtataatagttatcatctactgttaataccattttaataataacagtttcaggagaagttcctgtatcaagagcatatgcaaattttacatctaatggtgaatatgttatgtctgctgctactggatggcttatcgacaaacaa

SEQ ID NO: 4083 - DNA, 200 bp, Lawsonia intracellularis
aaaataaagtaaaataatagtagataaataatacgatactgtcgcatacaaccagtattccttactatataatataaaaaacttgacttaactttttactatcgataaacagctcttcatacttacctgaaatatgggccattagctcaattggtagagcagctgactcttaatcagttggttcggtgttcaagtcaccg

SEQ ID NO: 4084 - DNA, 200 bp, Lawsonia intracellularis
atggcccaccattttttatacaattctgagatactcattaatatatttaattatgtataaaagaaatagtacactaattttaacttctacgccctaaccattatatataaatataattataaatggttgcctgatgtaaatcaataactatccataaactgcatgaaatctattagataacgctttactataactttcta

SEQ ID NO: 4085 - DNA, 200 bp, Lawsonia intracellularis
aagtttctgataaaaaaagttcacttgtctgtgacttcattctatttgaagaaatatctactaaccatttacgccatgaactattaacaatagctttttgtattactttctttaatgctagtatgtttcctggttctaccagtgcctccaaaggaagcaagtctggcattacacctacatttgtagatataagaggccgt

SEQ ID NO: 4086 - DNA, 200 bp, Lawsonia intracellularis
ttacaagctataatttctagtgcagctcttgctatagtttctgaacttagtgaagctattactccaagatccattgccgataaataatcagtaatactttgtacataacctgtaattattacatatggttcaatcttagcttcttttatccaaacttcaacctcttctttacttatagttgtaggaaacccaataagtaa

SEQ ID NO: 4087 - DNA, 200 bp, Lawsonia intracellularis
taagcgaatagatgtatacccttcttgaatcaataatgcgatagcattaataagctctttttggccttttaccctatcaaagcgccctaataaaccaatgacaaaatgatttgctgtaaatccatatttagaacgtactattcttcttcctaattcagaaaaataaaaacgttggttatcaacaccaccaataatagtat

SEQ ID NO: 4088 - DNA, 200 bp, Lawsonia intracellularis
ctattaatgattcttttacattaagtaatgacgtaatatgagaactcatttttgtatttgtagtaattatggcatcggtcatacttctataaagaagtttattaaaaatatttctctttggtaaacgttgatcaccacgagttcttactagtgcatagttacctttctttcttaatatcccccataaaaaaacagcctcc

SEQ ID NO: 4089 - DNA, 200 bp, Lawsonia intracellularis
cctctatgacagtttacgatatttggcttgaacaccttaatttgttgatatatactttgaataagtttaaaaaaaataaaaggacattttgtatttaatggaagtggaataggagaaaggcccatttcaacagctttatagtgtgtttcagtattattaagagtcaaaacaagtgttttatgtccagcttttataagaag

SEQ ID NO: 4090 - DNA, 200 bp, Lawsonia intracellularis
acgtgataactcaagagcataccaggctgttgcattgaaccatcgaacattaataacttgtattgttcttaaacattctggcgttgaataaaatagtgattttggagttgttatagccataatgtaaaaatatagcattataataatgcttcatcaatctagataatattaccttaaatgataagaaaaaactataaaaa

SEQ ID NO: 4091 - DNA, 200 bp, Lawsonia intracellularis
cagctagttataaaatagattacaattgaaaatatacatattttttattatctaaaaaatatgaataaatataaggggcagttatggctcatacaaataaacattatcttgatttacctggctcttatttttttacagagatcaaccaacgagttaacacatataaaaaaacacacccagaaaaatcaattattcgtttg

SEQ ID NO: 4092 - DNA, 200 bp, Lawsonia intracellularis
agtattggtgatgtaacacgtcctcttgtccctgcagttattaaagcacttcatgatgctactgatgaaatgggacaaccttcttcttttcatggatatggtccagaacatggatatgaattccttataggcgaaatcatagctaatgattatacgtctagaaatgttcatattgaagcagatgaaatatttgtaagtga

SEQ ID NO: 4093 - DNA, 200 bp, Lawsonia intracellularis
tggtactaaatgtgatattgctaacatccaagaactctttgacccctctgatacagtagctattattgatcctgtataccctgtgtatattgattcaaatgtgatgtctggaagacttggaaagcttataaatggtatatggtcaaaactcatctatcttccatgtactatagaaaataattttatccctgaacttccaa

SEQ ID NO: 4094 - DNA, 200 bp, Lawsonia intracellularis
cacaacatccagatatcatctatctttgttatcctaataatcctacaggaacagtattatcaaaggaccagcttaccatttgggtaaattatgcaaaaaaagaaggagctattattctttttgatgctgcttacgaggcgtatattacagatcctactattccacatagtatctatgaaatagatggagctaaagaagtt

SEQ ID NO: 4095 - DNA, 200 bp, Lawsonia intracellularis
gctattgagtttcgaagcttttcaaaaacagcaggatttactggattacgttgtgcttatactgttatacctaaagagcttaaagcaaatacaagagaaggtaatgaacaataccttaatatgatgtggaatcgtcggcaaactacaaagtacaatggatgctcatatattgtacaaaaagctgcagctgcaatctatac

SEQ ID NO: 4096 - DNA, 200 bp, Lawsonia intracellularis
tcctgaaggacaaaaacaaatccaagaatctatccaatactatatgaaaaatgccttaattatacaaaatgcaattacacaaatgggtattactgctgttggtggtataaatgctccatatgtctggataaaaacacctgacaacctaagctcatgggatttctttgatcttcttttacagaatgctggagttgtaggaa

SEQ ID NO: 4097 - DNA, 200 bp, Lawsonia intracellularis
cgccaggagtaggttttggacctcatggtgagggatacttccgactcacaggctttggatcatatgaagataccaataaagccattgaacgtattcaaaaggctcttttaatataaaacaatgtagaaattcaatacactttaaaagttaactactcaacctacacaataaaagtaaatgactatcttaactctgtcata

SEQ ID NO: 4098 - DNA, 200 bp, Lawsonia intracellularis
gaacacgtttagatttcagaagaactttttgttttggtaataaatttttatcaactacgttatctatccaatctctgaactgcttctcactacactctagctgctcagtatttgtatatgaagatgacgtataaggaataacttttaactgttgtttaaaaaacttttgtggataccctactggacttacaattgcttct

SEQ ID NO: 4099 - DNA, 200 bp, Lawsonia intracellularis
aactcctggcaaacataatgaatttttacaatgttaccattaggagtttcccataatgtaaacatcaacatccccccaggaggtgtcccatttggaggataaccatgtatcttccactgtaagtttaatagccctgcaatagattgtatattaccctcatgccctgaaaatataactaattttgctttattaatattaga

SEQ ID NO: 4100 - DNA, 200 bp, Lawsonia intracellularis
atctacatctgagcttgttaatgcatcagcaattgcattcaataataaacttcctctacttgtagccatctcaggaagcctgtttacaatattagataacgtattataaatagggtaaagctgttctagttgttcataagatatgttcaaattagtttgattaccccttggccattctccttgcataaataaaaaacatt

SEQ ID NO: 4101 - DNA, 200 bp, Lawsonia intracellularis
ctgttgccacagaagcaaaatgcaatcctccaataaactttaatttcttcttttttttattaaaaaaaacactactaggaatatctaagatagtacatccttctggtaatccatacttcttgcaggtttctttaggacatggacctaaaatatctacaatgagtcctaaaggtttttcaagttctttctgtatctcttga

SEQ ID NO: 4102 - DNA, 200 bp, Lawsonia intracellularis
acttccttatattgttgataaaattcttgaaagactttagacatatcaacaggataatctcctgtttctgttgaattaaaaagaggatccttattcttagagtcaaaaaaaaatacttaaggccgcatcctggtgcaagaccatttaaaatagcaacagctgttgcctgtgttctctcagcagtattagcacgaacatat

SEQ ID NO: 4103 - DNA, 200 bp, Lawsonia intracellularis
attagctcaggattaggacatatatcttgaggaagtaactcatttaaccaagggtcttcgcgtaatgcttcccataaattactaataagaatacttcctctagaagtaagataaccattatttacaggccaatatggccactctttttgtgtccactcatctaactcactatttggaactattggagaacgaagtccatg

SEQ ID NO: 4104 - DNA, 200 bp, Lawsonia intracellularis
tcgagataggacaaccatcttgattaacctttcttgatcttgctcttttgctgctattggctgaaacgtacctaaaattaaccctactagtaagagaaataaagaaaagttatacattattaccccaaaaaataactatatattattttaaacttcattgtgtttataaagataatatgatttttcattatattgaccat

SEQ ID NO: 4105 - DNA, 200 bp, Lawsonia intracellularis
ttttttatcataacactcattaactaattataaattagctaagggagtaccaaacctttagcgattacaagatataaatataactttaagagtataataaacttaaaaagtatatcctaatttatttctactaagatatacttcttcagttacctctagatattacattaatataaagtacgttttgatattaatggtct

SEQ ID NO: 4106 - DNA, 200 bp, Lawsonia intracellularis
agtttcttttattatacagtctttcttaactaaacgataaacccattctttaaattgtttttcactgtattcaaaaggttctttattgacttttttagacgttgttggagaaacagagtacaactgctgcttataaattttttgtggatatatagaaggtgttgttactgtttctaaggactgacaaatataatgtgctt

SEQ ID NO: 4107 - DNA, 200 bp, Lawsonia intracellularis
tcactatattcccattaggtgtttcccataaagtaaaaacaagcatacctccaggaggagttgcgccagaaggatacccaggaatatcccaatctacagacagtataccagcaatattagcaatattagtatcatggccaacaaatatgactaactttgctttattaacgtcagaatcagtatctgagttagttagagca

SEQ ID NO: 4108 - DNA, 200 bp, Lawsonia intracellularis
tctgttattgttttaagtattccacttgctttaactgtagccatttctggtatccgatgtattgcattaaatatttttgtttgaagaggaaaaactttcttaactatatcttgagaaacattaataccacttaaattacctttaggccattctcctagttcaagaaaaaagagtgcagcagataaagcagaaatacctaa

SEQ ID NO: 4109 - DNA, 200 bp, Lawsonia intracellularis
tccccctgttagatgtaccccattgtgtttattcaaaataattgtatcaggaatatcaagaacactacactcagaagataatccatactttttacacgtagcttcaggacaatatcctaatacatctgcaactatcttcaaaggctcttccaaatctttccgtaatgtctggactcccccatattgttgattaaattctt

SEQ ID NO: 4110 - DNA, 200 bp, Lawsonia intracellularis
gaataactttggtaaaatccaaagaacaacatccagtctccaaaggagtgaacaaaggatccccttctgtagtatctagtactctgtattgaaaatcacagcctgaggcaaaaccatttaaaattgctatagctgtagcttgagtacgctccatagtatcagatctaacataaattgactgaggatcaggacatatatta

SEQ ID NO: 4111 - DNA, 200 bp, Lawsonia intracellularis
cgtggaaacaattctttcatccaagggtcttcatgtaacccctcccataatatactaataagaacacttccacgctgagtgagataaccatcttttacaggccaatatggccattgtttttctgaccattcttctaaaaattcatgcgtctctacaggaggacgaaatccatgtcttgaaagaataaccatttttattag

SEQ ID NO: 4112 - DNA, 200 bp, Lawsonia intracellularis
tcgttcttctgcctttacctcttcagctatagaaaaaaatactataaaaaatgttgctattaaccatataataaaattaactctattatacataaaaatcctttagtaagtctaaggctaactactattttttaacttcaatatagttttcaaaaaacaaaaattttatagtctatttagtaagatataagttaaataag

SEQ ID NO: 4113 - DNA, 200 bp, Lawsonia intracellularis
gttcctttttaatttataaaaagcataatctatcctataaataaaaaaaacattttcttattaactaaaactaaaatatcttaaaaaatatcattgttattatataatgttactaagtaacatgaatagattgcaatatatattaaatacattcttatagacataaagaagagaagtgttattatgaacaagataaatat

SEQ ID NO: 4114 - DNA, 200 bp, Lawsonia intracellularis
tgactttttcttattgcccacactaacatggaatggtataaagtaaacataatatgctgtaattatgtaaaattattaactaaacaaaggatagcttcatgaactacccaccggaaactcaatatgaagcattggaaaaacgaggtgttagtcgtcgtgactttctaaaattttgttcctttgcagccgtttatttaggc

SEQ ID NO: 4115 - DNA, 200 bp, Lawsonia intracellularis
cttggcccaacaggacacctagacatagcaaatgcaatggaaaataaacctcgtcttcctgttgtttggataaacgggttatcatgtagttgttgtacagaatcttttatacgctcagcgcaccctcttgcttctgatattgtcttatctatgatttcattagactatcaggatacaattatggctgcagcaggacatca

SEQ ID NO: 4116 - DNA, 200 bp, Lawsonia intracellularis
agccgcagaagtttttgaagaaacaatcacagaatataagggtcgctatatccttgctgttgaaggaaatgctcctctagctgaccagggtatggcatgttttcaagaaggaagaccttttcttgaaaccctcaaacgtggtgcagaaggagcaagtgctgttatttgttggggaacttgtgcctcatggggatgtgtac

SEQ ID NO: 4117 - DNA, 200 bp, Lawsonia intracellularis
aagctgctcatcctaatcctacccgtgcaacacctgtacctaaacttatccatgataaacctattatccgtattccaggttgtccacctattcctgaagtaatgagtaatgttgttgcatatattcttacctatgagagacttcctgaacttgactctcaaaaaagaccagccatgttttacggtaaaaccgtacatgat

SEQ ID NO: 4118 - DNA, 200 bp, Lawsonia intracellularis
caatgtgttcgaagagctcattttgatgcaggtcaatttgtagaatcatgggatgatcctgcagcttctcttggttattgcctttataaaatgggatgtaaaggtccaacaacgtataatgcatgtcctgttactcgatggaatgatggtgtgtcatatcctattgaatctgggcatggctgtattggctgctctgagaa

SEQ ID NO: 4119 - DNA, 200 bp, Lawsonia intracellularis
tgacttttgggatagaggctcattctatgataggataaccactattccacaatttgggacaaatactactgcaaatacagtagggttagctgctgttggtgctgttggtgcagctgcagcaacacatgctgctattagcactgccgtacatttaaaacgcaaagctaatgcaaaagttgaagaagaaaatgctcaacctc

SEQ ID NO: 4120 - DNA, 200 bp, Lawsonia intracellularis
atacttgctgtcactctcatcagtcaacagataatacaactgctcacacctgttgtagtaactctgctgatgaaaaaacacaaaatactacagcctgctgtcatagtaaaaatgtaatgaactcaggtaattctaacgaaactactgatagttaataaaggattcaactatgagctatcaatatagcactcaaggatatg

SEQ ID NO: 4121 - DNA, 200 bp, Lawsonia intracellularis
aagtaactgacgcaggaaaacgtattgttgttgatcctattacacggattgaaggacacttacgttgtgaagttaatattaactcatcaggaataattacaaatgctgtttcatcaggaactctttttagagggcttgaaattattcttaaaaatcgtgatcctagagacgcttgggcctttgcagaacgtatttgtggt

SEQ ID NO: 4122 - DNA, 200 bp, Lawsonia intracellularis
gtttgcacaggaactcatgctctaacctctatatatgcagtagaaaatgctttacaaattgaagttccagcaaatgcaaactttatccgcaatatgatgcaattagcactatggtgtcatgatcatattgtacatttttatcaacttgcaggacttgattggattgatgtcgtttctgcagcaaaaggtgatcctaaaaa

SEQ ID NO: 4123 - DNA, 200 bp, Lawsonia intracellularis
agcttctgaactagctcaaagtatctcttcttggccaatgtcttctccaggttattttgctgacatcaaaaaacgtcttgtagatattattggctctggtcaattaggtattttcaaaaatgggtattggggtcaccctgcttacaaacttccaccagaagcaaatttaatgcttgtggcacattatatcgaagcactca

SEQ ID NO: 4124 - DNA, 200 bp, Lawsonia intracellularis
acatgcaaaaggaagttgtaaaaatccacactatttttggtggtaaaaaccctcatcctaactggattgtaggtggtatgcctttagctctaaacttagatgcaaaaggtggtgctgacgttataaatatggaaagattggagtatgtccagcgtattatcaatatttgtaaagactttacttcaaaagtacttatgcct

SEQ ID NO: 4125 - DNA, 200 bp, Lawsonia intracellularis
gatactatagcacttgggaaattttatcctgaatggttgtctattggtaagggtatatctcatctatctatactttcttatggtggattcccaacaattagcaatgacttttcaaatgacagcttacttgttcctaatggagctattatcaatggtaacttcaatgaagttcatcctgtagatctttttgcagaagatga

SEQ ID NO: 4126 - DNA, 200 bp, Lawsonia intracellularis
agttcgagaagaagttagtcattcatggtatcgttatcctaatgatataacatcactacatccatttgaaggagaaaccattccagaattttctgttggacctaatacaaaaggaacagaaactgatattaaagaactggatgaacgtgcacgctattcttggataaaaacacctcgttggaaagggcatatgatggaag

SEQ ID NO: 4127 - DNA, 200 bp, Lawsonia intracellularis
ttggccctctacctagagtgcttattgcatattatatgaagagagaagaaacagtcacagctgttgatgagatatgtcggcaacttaatgttcctgtcacacatatgtgttcaacacttggacgtattattgctcgtagtcatgaagcagtatgggctgctgaaaaacttcaatacttttttgatcgccttatagctaat

SEQ ID NO: 4128 - DNA, 200 bp, Lawsonia intracellularis
acaaaggctggtgatttaactgtagccaatactacaaaatgggaacctagtacatggcctaaagaagctaaaggcgcaggttttactgaagcacctcgtggagctttagggcattgggttgttataaaagacacaaaaattgatcgctatcaatgtgtagtccctactacttggaatgctgcacctcgaagtgatagtga

SEQ ID NO: 4129 - DNA, 200 bp, Lawsonia intracellularis
acaattaggtccttatgaagcagcactaatggatacacatcttgctgaaccagaaaaacctcttgagctattacgtactatccatagctttgacccttgtctagcttgtgcaacacatattattggaccagatggaaatgaggtactaagtgtccaatgtaatacagctggatgttgataataacagtagtatcctgaat

SEQ ID NO: 4130 - DNA, 200 bp, Lawsonia intracellularis
catagataaaaaaggtagtagtaagatattaaaaagccacctgtttaatcactatataaacttggcttaacataggtaggatgtattatggaagaaactccaccaccacaaaaagctaaatatattattgaactacctgttagaatctggcactggagtattgttatctgtattgctacactgattcttacaggatacta

SEQ ID NO: 4131 - DNA, 200 bp, Lawsonia intracellularis
tattggatatccctggcactctatagatggacacccaacctatctctttcttatgggatatatgagaatagtacattttagcgcaggctttatacttgctattggtatatttttacgtcttatttatgcattctttggtaataactattcaaaacaaatttttgttattcctatatggcaaaaatcatggtggcatggcc

SEQ ID NO: 4132 - DNA, 200 bp, Lawsonia intracellularis
tcataggagattttagatggtatttatttatagataaaactccacatgtccactacgaccataacccattagctcaagtaggaatgtttggctgtatttttcttattttcttcatgacattcactggaatgggaatgtttataatgagttctgacaatccatggcttgtccatacatttcattgggttcttgatgttgca

SEQ ID NO: 4133 - DNA, 200 bp, Lawsonia intracellularis
tactgggttggtgggaatggtatagatctccataactggcatagacttggaatgctctttattattgcatttatcattatccacttgtacatggtaatacgtgaagaaataatgggtaatacaacactagttagtgctatgtttaatggatttaaactagttcgacttataaaacaacccaaaaagaattaagtatggaa

SEQ ID NO: 4134 - DNA, 200 bp, Lawsonia intracellularis
tctattattgttcttggattaggtaacattctatatggagatgaaggttttggtgtacgagtagctgaacagctttatactcgttatgatttccctgataatatagaaatcattgatgcaggcacgcgaggtcaagcattattacaatatgttgaaaaagcagatagattacttatccttgatgcagtagattttaatat

SEQ ID NO: 4135 - DNA, 200 bp, Lawsonia intracellularis
gccaccaggaaaaattatttttaaagataacaatgaaattccctcttaccttacagctcataaaatgagcttacaccaaacaagcttttctgagattattgggttagccagcctacaaaaactattacctaaggaaatggttttactaggtgtccaaccaatatctttagagtatggaacctctttaactccagatgttt

SEQ ID NO: 4136 - DNA, 200 bp, Lawsonia intracellularis
ttcatctattggataaagctgttgaacttgcattgaaccaactattaaaatggaatattacgccacaaccagcagtaacaaaaaaagtattccaagcagcaggaatttctttatcaaattttaatttataactattgttatatcacaatgtaattacgtttgttttttattttttaattgatacttcttgttttaatatg

SEQ ID NO: 4137 - DNA, 200 bp, Lawsonia intracellularis
aattaataataggaggttatcaatagtttattatagctgactttatattacatatatttatgtaactatacgtaaaaaatatatactttactattactatattggaataatatgactatagcactattttataataagctataagatagttacagactataaaaaatacaacaactatttttttcatcaatcaattatct

SEQ ID NO: 4138 - DNA, 200 bp, Lawsonia intracellularis
taaaaaaagaaagatagctcttataatatatgatataactatacgtaataaaaagataataaaagattatatacaaaaaaataacagttatttccaatttacaagaacaaataataataataataataataacaacaataaatctctaacaaatatacaatatattttttacacgggtataataaaatatttcttataaa

SEQ ID NO: 4139 - DNA, 200 bp, Lawsonia intracellularis
tgctatagtaaaattactaaaatagtgtatttaaagggtaacaaaaaaataaatatacaatgctatatgatagtcagtaatattatttgattatggtttggttaataaaaaatatatacaaaatataatatccaaaaaacaacaaccttgttctaaaagtaaaggttaattctttcataagaaaatcactagctaactaa

SEQ ID NO: 4140 - DNA, 200 bp, Lawsonia intracellularis
aaccatattgtttggatttttattgtgataaacaatagcccttataatataattgaaatattaacaaactttagtatccttatggaggatatgaacttttctaatgaactaaatatacttaagattaacaaattttgttttagaaaacgtaagaaggcataccaacatatgcaagctattgctgttagcttatggcgtct

SEQ ID NO: 4141 - DNA, 200 bp, Lawsonia intracellularis
tgcattacaaaactctttcccttcagaatatgaaattatttttggagcatatctctgtaaaaaaaactctcatattccaataaataaacaaggtatactagatccatactttcaaaaagtcctacaatcttatattgaaattcttaatactcatggtgatagcgatttcacagaagttagctctcaccttattaatatgt

SEQ ID NO: 4142 - DNA, 200 bp, Lawsonia intracellularis
tacaactttccaaagtaaacaatgacgcaataaaactaaaattagccctcacaattagaactatgtataatgatatctttaaaaaacttatttagctctatgcaaattcttactataacttcttctaccaataggagtggtggtactcgtcaagcaatatatcaaactcaagaatttgcaaagcgtgggtataatgcaag

SEQ ID NO: 4143 - DNA, 200 bp, Lawsonia intracellularis
gctctgcttaccccatgactcaactttttgggagttaccaaaaaaagaacaaaatcctctttggattgcattacctgaaaatcattcaaaacaaaaaatttttatagaaaaattattatctgaaacaagccctacagttattcatgcattccataataaagctattaaacgtattgcatggtggggactttcatggaaat

SEQ ID NO: 4144 - DNA, 200 bp, Lawsonia intracellularis
ataaaaatgtaacatgtgttgcacaccgaggtgtcatttatcgacctaaaaaccctctgccatacctatcccctgcaataaaagcttttatacctaattctaaagcatgtgctaaggcactccgatggcattgtcctcgtaaaaaaatctatattgtacctaacgggttaccagccgaacgtttcactccaacaatatct

SEQ ID NO: 4145 - DNA, 200 bp, Lawsonia intracellularis
caagaggaagctctcaagcatattggaatttcttatattcctaaatttttatttggctttgttggaaataacaaaccacaaaaaggtttcgacatattattagaagcgttttcaaaagcacatatagctgatgcacacctcttaaccatgggtgtaaaagaagaatactggcgtcctctatgcgaacaatttcatattgc

SEQ ID NO: 4146 - DNA, 200 bp, Lawsonia intracellularis
agaacaagtacactttcttgaccatgtagaacatatttctaactacttacaactctgtgatgcttttattgttccatcccgagcaatggaatcttcacctaatactcttattgaagcaatgtctatgggacttcctataatagctacaaatgcaggagggattcctgaactagttaaagggaatggaattattgttcctg

SEQ ID NO: 4147 - DNA, 200 bp, Lawsonia intracellularis
tagccgatgcaaaaagtatggccaatgcattagctcatatgctctctaatcctgcacaaagggaagaatggtctaaacaaagccgtctattaagtcaacaatattcaataactacacgttgtgatacactagaagggatttatcataagataggagcatggtctaactaactattgcaataaaaataattaacataataa

SEQ ID NO: 4148 - DNA, 200 bp, Lawsonia intracellularis
aaaataaaaattctaaaaaatctacaaacctactaataaggtattcttctaactctcactaataagaatatacttataaaaatcatataactatgatgtatactcttctgagtctattaaaatagttacaggtccccagttttcaaaatatacgtccatgtctgctccaaaaacacccttttgaacttttcctggtaaac

SEQ ID NO: 4149 - DNA, 200 bp, Lawsonia intracellularis
gtatacacagttgttcataaaatgttataaaaaactgtttggcaacctttcctgatgcagctaaatgaaaagatggccttcttcctttatggcaatctccatatagagtaaactgaggtactaatagtaactccccattgatatcttcaagtgaatgagcaaatttcccttctttatttggaaatattcgaagtgttgca

SEQ ID NO: 4150 - DNA, 200 bp, Lawsonia intracellularis
agcttttctacaaataataaacaaatattattattaggtaatgaacactcatcaacaagaccaaaaccaattagaacaacaagacctactcctatttctgtagtgaggttactatcaatatacaatcgactgtgatgaacacgttgaataactaatctcatatttctatgaattaaaatgttattatctagttgtaactt

SEQ ID NO: 4151 - DNA, 200 bp, Lawsonia intracellularis
attatgatattcgaatagctgttacaataacaatggctttaattcctttacattctcctgtaaaacctaaaccttcttctgtagtggcctttatatttacatttgctagatcaagatctaataatcttgaaagattacttctaatagcttcacgatattgactaatcttaggaagttgagcaactattgttgcatccata

SEQ ID NO: 4152 - DNA, 200 bp, Lawsonia intracellularis
tggacaatctttatagaagattccaatacttttgttagcacatgatcaagcaaaatagctgaatttattccatcgtaacgcttatcagagtcaggaaaatgaaggccaatatctccgcctccaatacagccaagcaatgcatccataagtgcatgtagtaatacatctccatcagagtgtgcaacaacgtttggtgcatt

SEQ ID NO: 4153 - DNA, 200 bp, Lawsonia intracellularis
gggaatagatattccccccaatctcatagaacgaattggctgatttatttgatcttcagttacatatttatgaacatcatagccataccctactataggaactgtagtttttggttgttcgaccatatataataaatcctgagggaaacttattttcctattttctatttcaccattaataacttgtacagtatgcccac

SEQ ID NO: 4154 - DNA, 200 bp, Lawsonia intracellularis
acaactcaagaagtgatgcatcatctgtgacagtccacttttctaatgtagccctattatgcccttcaacaattgtttttaaatgaaaaccttgtggtgtttgtacagcaataagttgttccctaggtcgtgtaactataacttctccttgaataacctgtttaattgtatctgtaacagatatacctggaactactcca

SEQ ID NO: 4155 - DNA, 200 bp, Lawsonia intracellularis
actgctccagcttctaatacttcaataacattattaatcaactttggagagataaaaggtctagctgcatcatgaataaggacatgagagcagttttttgggagagtgttcaatgcatttttaactgagtcctgacgcaatttcccgccagaaataactatatatggaagtcttaaatcatactgagctgctaatctatc

SEQ ID NO: 4156 - DNA, 200 bp, Lawsonia intracellularis
aacaactttttcttcattatcttttacttctgaaggaaagaccaacacaacaccacggattcttgcacaatgcataaactgcagcacagattgccagtaaagaggtatgcctttccatacaaaaaattgttttgctatacctattgtacttaataaccgactaccctgtcctgctgctaaaattaaagcccaagtctcca

SEQ ID NO: 4157 - DNA, 200 bp, Lawsonia intracellularis
ttttacactctcaaatatgagtctataatctatctgactattatgaagaaaactataataaaggagtcaagctataagccgggttctgtaccctaatgggcgactgtcattcatctaggaatatagttacctatattctcaagcaacctacccaggaacattggccgggtcagcctgttcccctatttggtcttgcttca

SEQ ID NO: 4158 - DNA, 200 bp, Lawsonia intracellularis
aacggggcttgcctagctcgctatatcactataacgactggtagactcttactccaccgtttcacccttaccactattattaataatggcggtttactttctgttgcgcttgccgaagatcactcttcctgggtgttacccagcgttttaccctatgaagcccggactttcctctccataaatccataaaaggatatgca

SEQ ID NO: 4159 - DNA, 200 bp, Lawsonia intracellularis
gcgacagtccacttgactcctaatacataagccctcaataatatatattaactctctatttcttcaacaggctcctgcttaatctcttcttcactaaaatgcttactccaataaattaggcgctggcaattaggacaattaataatcttgtgtcctccttgtagttcaatgtatgtttgaggaggaacaacaatatgaca

SEQ ID NO: 4160 - DNA, 200 bp, Lawsonia intracellularis
tccaccacaaacaccatctgtgacaggaactatcacaggatgtgataaacgacgtcgaataaattcgtagcgctcaagtataggacgaggaatatcacttgtagtcgttgaacgtgaactttctagctctgctaaacgattctttgcatcctttaaatattcatcaagacctgctttcttaagttcaagttcttctttta

SEQ ID NO: 4161 - DNA, 200 bp, Lawsonia intracellularis
ttgccgtccataaagactctatttctgcaagagtggtttcttgaagttgcttttcttcaagtaatgtattgcgttcttcttcacgagtacgattaagacgctccatattatccatttctcgtgccatagcttggtattcacgagagtttgaaacctgcattaatttgcctttacttctctttatacgtccctcatcatct

SEQ ID NO: 4162 - DNA, 200 bp, Lawsonia intracellularis
tcaatttcatgatgaatacgcttttccctttctttaagatgttctagtttttctataacaagagtacgctggctatctactgattcaaacttagcagcaagtgtttctaattctttgggtgcttgtataagctcttcttctacaatataaatagcatcatctacatgttgaagcgatacaagttgacatatttggtttat

SEQ ID NO: 4163 - DNA, 200 bp, Lawsonia intracellularis
atacagactcacaaatttctcctaacggctgtcttaatctaactctctaattttcttttatacaaaaagaacgtaatggatcttgagttggtacaaataccacagttacatctaaaagaacactctgtaaatattgagaaaaacgacgcatcatttcttcctcaagacagaaatgtccaacatctaaaacaggtaaagaa

SEQ ID NO: 4164 - DNA, 200 bp, Lawsonia intracellularis
aactctaacgcttgatggtacttcacatctccagtaatcaaaatatcagccttctgtctagctgcttcagcagcatactctgctccagctccaggacaaaaagctactctatatatttgtcttggaagttcacctatcaatcttggtacagcttcacctatcaatggatatatacgttgacaaaaattttcaacaggtac

SEQ ID NO: 4165 - DNA, 200 bp, Lawsonia intracellularis
aggtgaagaaaaatgaccaatacgaccaaaaccatattgagacgacaccccattagtcgtatgaatagattcaagcacactacattcatgtaactctaatacttcagcaagccatgaggcaggaccgtaaagatttgcatcaagagatgtatgtgctgaatatagcaaaatatttttagataacaataactttaacacac

SEQ ID NO: 4166 - DNA, 200 bp, Lawsonia intracellularis
tataataattatcaataatagttgggaatcgaggcctcaaccctaatggatggtgtgataaaatcatgtttgctcctaactcagatgctttataaaccgattctggagttggatctaagcatacagcaagacaaaaaatttcatcttgacttgaagcaacttgtacacctgagttatcccatgtagcagcaactgataat

SEQ ID NO: 4167 - DNA, 200 bp, Lawsonia intracellularis
ggagccacctcttctattatattaataatattattatagttcatttactataacaccacttataactaccttaatactaatatatatatatactaccaaaaagctaaggggtctactttaaaaatatcaatatgtaaatcaactatcaaaaaaaaataaaatattattatttatcaatagttctgcaaaaatctacagca

SEQ ID NO: 4168 - DNA, 200 bp, Lawsonia intracellularis
ttttgaaatattattgttcctaatatagtttgttctcctcgtggccagcctggatgatttgttctatgatgaaaagcctcaggatgtggcataagaccaaaaattcttcctgaagtatctgtaagccctgcaatagcaaatggggagccatttggattataaggatactcttgtgtagcctcacctgtagtagggtcagc

SEQ ID NO: 4169 - DNA, 200 bp, Lawsonia intracellularis
atactgaagaacaatatgctgcccatcaataagctgttgtagaatgctaggctccctaacaatacatttaccctcaccatgtcttacaggcatagaaagcaaattcttttcactcaaaccacgagtaaacacacatggactatcttgatttactcttaaagaaacccaccgatcttcaaaacgtgcagaatcattatgac

SEQ ID NO: 4170 - DNA, 200 bp, Lawsonia intracellularis
taagtgatacttggcgatcaaacaactttccatcaagagatggtaacatacccaacttaactaataattgaaaaccgttacatataccaagaacaagaccaccttttgctataaaattttttaagcttgtaagtaatgaaacaccatttttatcagatagatatcgccaacgttgtgcagcagcttgagcagcaccaagg

SEQ ID NO: 4171 - DNA, 200 bp, Lawsonia intracellularis
tcatcaccatctaaaaaaccgccaggaaaaactaacagttgataactatcaagaaaaacttcagctgcaacaacttctgaaaaatgtttaatatcaacataatctgcaccagcaagccttattgcatgtgcggtttcattatgagagttcgttccatatccagtaattactaaagcattaacctgtgccatgtagtatcc

SEQ ID NO: 4172 - DNA, 200 bp, Lawsonia intracellularis
atagatgtaagtagattttagtataataattaattttatgtcgatgaaaaatttcagtcaatggctgtctttttataaacaatcatagtattatttctgtcgaaggaaagtttgtaagctaaactcttgaaaattagggtacagaattataagaaattagctatcttttgtttcccttgatcttataatgtataatatgc

SEQ ID NO: 4173 - DNA, 200 bp, Lawsonia intracellularis
attatcttgttttattaaaaggacaaaatacatgaagacaaaatttatcttcattacaggaggagtactatcctcacttggtaaaggtctttcagctgcttctataggagcactactgacctctcgaggtatgacagtcactattcaaaaactagatccttatatcaacatagatcctggtacaatgaacccataccagc

SEQ ID NO: 4174 - DNA, 200 bp, Lawsonia intracellularis
atggtgaagtttatgtcactgatgacggtgctgaagcagatcttgatcttggacattatgaacggtttcttggtacctcgctttcacaaaagaataactccacttcaggagccatttattacaaagttattagtaaagaacgtcgtggtgactatcttggtgccacagtacaggttatcccacatattacagatgaaatt

SEQ ID NO: 4175 - DNA, 200 bp, Lawsonia intracellularis
aagtcaacaatattaagccttgcaaaaagttccatagacaataatactccggatattgctatcattgaaattggaggcactattggggatattgaaggacttccattccttgaagctatccgacaattacaaactgatcttggtaggcaaaactgtctttatatccaccttacattagtaccctaccttgggacagctgg

SEQ ID NO: 4176 - DNA, 200 bp, Lawsonia intracellularis
tgaacataaaacaaaaccaacacaacatagtgtgaaagagcttcgttctattggaattcagccaaatatcattctttgtcgttgtgaaaagcctatccctgatgatatcaaagcaaaaatctctttattttgtgacgtagaaaaagatgctgttttttctgctgctgatataaataatatttatgagttaccactcaagt

SEQ ID NO: 4177 - DNA, 200 bp, Lawsonia intracellularis
tttatacagaaggacttgatcaaaaaattacaagttttcttaacttacctactaaacaagccaaccttaaaccatgggaacaacttgttaacacaattaataaccctaaaggaaaagtaacaatcacaatcgtaggtaagtatgtaggacttacagaagcatataaaagcctgcatgaagctctttgtcatggaggaata

SEQ ID NO: 4178 - DNA, 200 bp, Lawsonia intracellularis
gcaaatgagattacagtagacttacaatatgttaactctgaaattatcacagaagataatgttaatgaaatttttaaaggtgttgatggcattcttgttccaggtggatttggttctcgtggtatcgaaggcaaaattgaatctattcgctatgcacgccaaaaaaatattcctttctttggcatatgtcttggcatgca

SEQ ID NO: 4179 - DNA, 200 bp, Lawsonia intracellularis
atgtgctgtcattgagtttgcccgtaatgttgcaggaatagaaaaagcaaactcagaagagtttaatcctgtagcagctgataaagttatttatcttatgaaagaatggtacgatttccgcaacaatgccatagaatatcgtgactcactatgtgacaaaggaggaactatgcgtcttggttcttacccttgtactctta

SEQ ID NO: 4180 - DNA, 200 bp, Lawsonia intracellularis
taaaaaatactaaagcttttaaagcatatcaaacagactctatagaagaacgtcatcgtcatcgatatgaatttaataatatatatagagaccagtttgctgaaaaaggaatgatatttagtggaacttctcctgataatacacttgtagaaattattgaacttctcaatcatccttggtttattggatgtcaatttcat

SEQ ID NO: 4181 - DNA, 200 bp, Lawsonia intracellularis
cctgagttcaagtcataccctatgaaaccacatccactatttaaagactttatccatgctgcttgcaaccataataaacaataacactgtaatatatatatatattcactgcttatgactacagatgatctttatcactccctggtttcaaaacattttatttttgctggaccatgtgtactagaatctaaggaacttgc

SEQ ID NO: 4182 - DNA, 200 bp, Lawsonia intracellularis
gtgcaactcagctactattattgccgaacaagcttgtaatacaggactccttgctgtctttaaaagctcttgggataaagcaaatagaacttctaactcatcttttagaggtccaacgtttaaagagggtatggaatggttatatagcgtcaaaaaagagacaggattacctattgttacagatatacatctcccagagc

SEQ ID NO: 4183 - DNA, 200 bp, Lawsonia intracellularis
aagcagctcttgtcgcagaagttgctgatattatacaaatccctgcattcctttgtagacagacagacttattaaaagaagcagcatatactgattgcattattaatgtgaaaaaaggccaatttcttgctccatgggatatgaaagctgtccgtgataaaatttttgcaacaggtaacaaaaaattactctttactgaa

SEQ ID NO: 4184 - DNA, 200 bp, Lawsonia intracellularis
cgtggtacaacttttggttataataatcttgtcgtagactttagatctattcctattatgaaggaacttggagtacctgttatcttcgacgcaacacattcagtccaacttcctggaggaaaaggtgaatcttctgatggccaaagacaatacgtgtcaacgcttgcttatgctgctgcagcaacaggtgttaatggaat

SEQ ID NO: 4185 - DNA, 200 bp, Lawsonia intracellularis
ttttcttgaatgccatccaaatcctgacaaagccttatgtgatggtcccaacagttggccactaaatcaactggggacattgcttgctcagttatcagctatatggagtgttgtaaaatgagctttaataataataataataataataaaatagcaaataaaactttagaacatcagtatactcatacatcttttcaaga

SEQ ID NO: 4186 - DNA, 200 bp, Lawsonia intracellularis
acaactattaaaagaacgtgcacatagtatacgtctccttatccttgatgtggatggtgtcatgacagatggtagtctttactatgaggatacaggattatgtatgaaacgattcaatgtactagatgggataggtattcgactagccaaagaggcaggattatcaattgctattgtttctggaatggatgttccatgtg

SEQ ID NO: 4187 - DNA, 200 bp, Lawsonia intracellularis
tagagcgtcgcttaaaggatcttggtatttctgactatcaccctgggattaataataaacatgcacacattgataagctgcgtactcaaaaaaatcttcaatggagtgaaattgcatatgttggagatgattgggtagacttagctcccatgacttctgtaggcttacctattgctgtggataatgctgtacctgaagta

SEQ ID NO: 4188 - DNA, 200 bp, Lawsonia intracellularis
aaagaattagcactttatattactaaacgtaaaggtggagatggagctatacgagaagttattgacttattgctcatatatcaaaataaaaaagaagctcttcttcatacatggatgaatcttaaatgaaaaaattttttatttggactataatacttatactcattttttcttttgcatattggttatatactcaaaaa

SEQ ID NO: 4189 - DNA, 200 bp, Lawsonia intracellularis
gtcatggattctttattcactacagaaaaaaaacaggctggaaatgagttgttaaatatcaatgatagtgacccaacatcagtagatcactctctttctcttgaaaactccttaggtttagcattaaaaggtgtaaatctttcccaaggagaaaatggaattgagctttggcgtcttaaggcttcttgggctcgtctctc

SEQ ID NO: 4190 - DNA, 200 bp, Lawsonia intracellularis
aaaagatagagaatctatacaagtagatagtcctattgttcaatatctacttggcgatggtttgaataatgatgctatcacagtacgtgcagataaagggaaaatagtagaaaatcagaatactattatactttgggaaaatcttcttattgcacaagataataaaagcataacaggtccctatatggtatatgatacaa

SEQ ID NO: 4191 - DNA, 200 bp, Lawsonia intracellularis
aaaaacgacatatatattttcctaatggagctcaatttacaagtccacaagctacaagtgcagcaggaaaagttacttgggatcttaaatcaaatattattagtggtaaaaatgggatcaaagttactatccatgcaaaaaatatataataagttataacgctacataataaatagattatatggttaaaggtgactata

SEQ ID NO: 4192 - DNA, 200 bp, Lawsonia intracellularis
ttgtatttaatattatatctagtatgtaaaagctggagtaaaaaagtaatgaagctatattttgtctcacaagttttattacttataggactaatatacacctataatcaacctacattatatgcacaacctataaaaaaaggttcgcttggtactgttgaaacaaaaattttttctgatgaattaacttatgacttaga

SEQ ID NO: 4193 - DNA, 200 bp, Lawsonia intracellularis
aaaacaacaaattacctttaacaaaaatgttcatgtacaacgtccagactttcaactcacaacagatacattaactatttatttagcaccacaaaaaaaatctcaaaaaaatgaagatctatctacaaaccctatttcaagtaaaatatctgctggcgagttaaaacatattgtagcaaaaagaaatgtctgtattaaag

SEQ ID NO: 4194 - DNA, 200 bp, Lawsonia intracellularis
gggataaatatacaggtactgcaggaaaagtcacctatacagaaaaaacaggtatccttcttttagaggattcgccagttcttactgatggagaaaatactattacaggcgatagtatccgttattatatatatgagaatcgaagtgaagttattagaggaaaaaacaaacgtgttgaagctacatttatgcaatattca

SEQ ID NO: 4195 - DNA, 200 bp, Lawsonia intracellularis
aatgaaaaggtaaaataatggcaacacttaaaggtgttgagctacaaaaatggtatggaaaccgtgaagttgtttgtggtgtctcaccagttatccatcaaaacgagatagtaggtcttcttggcccaaatggtgctggtaaaacaacttcattttatatgctcaccggaatcattaaaccatcaagtggaaaaattttc

SEQ ID NO: 4196 - DNA, 200 bp, Lawsonia intracellularis
tttgaaaatcaggacatcagttcatggccattatatcaacgtgcacgtgttggtatttcatatctcccacaagaaagttctgtttttcgtcacttaactgttaggcaaaatttacaaattatattagaatatacaacatattctaaaagtaaacaaaaacagaaagctgatgctcttcttgaagattttggtcttactta

SEQ ID NO: 4197 - DNA, 200 bp, Lawsonia intracellularis
tcttgaaaactcttatgctgtacatctttctggtggtgaaagacgtaggcttgaaatagctagagcacttatccgacaaccaaaatttattttacttgatgaaccatttgcaggaattgatcctttagctattcatgatatacaaagtattattcagctccttcgtgaaaagaatattggtattcttatatctgatcata

SEQ ID NO: 4198 - DNA, 200 bp, Lawsonia intracellularis
atgtacgagaaacactaaatatttgtgatcgagcttatcttatggtgaaaggccaagttattcttacaggaacacctgacgatattattaatagtaaaaaagctagaagtatgtacttaggagaaagtttctgtttataattaaggctagttgtaatttctatttgtgatctagcaaaggttttacatctttactgttgc

SEQ ID NO: 4199 - DNA, 200 bp, Lawsonia intracellularis
aacatcatatacagtacgatatggtgtatataaagctatcctcactacttgtatataaaaaggcaatagtaaccaggatgatgaaatgggactagaactcaagcaacagcttaaacttagtcaacagcttgtaatgactccccagttgcagcaggcgatccgtctattgcaactatcacgggttgaattagctgaaacaa

SEQ ID NO: 4200 - DNA, 200 bp, Lawsonia intracellularis
ttcaaaaagaattgttagaaaatccatttctggaagaatcgcaggaagaaatagcttctgaacgtcaagaaacacggacagaacatgatccttctgaagcctacgatcaggatgtatccaacactgcagactgggaagattatcttggtgaatttgcaagcacaccaaaacaacttcaatctcgtgaatacgaactttct

SEQ ID NO: 4201 - DNA, 200 bp, Lawsonia intracellularis
gaagagatgtcttctcttgaagcaagatatgcctctcgcccaacacttgaaagtcaccttatgtggcaacttcgcctttcaacgcttactgatgaacaaaaaaatttaggtgaagctattataggaaacctatcttcatcaggctaccttcaggcttcacttgaagaaatagcaaatagcgagcacacagatatagaaaa

SEQ ID NO: 4202 - DNA, 200 bp, Lawsonia intracellularis
acttaaacctgttctccatgcaatacaaagatttgatcctgtgggggtagcagctcaatctcctcaagaatgcctacttatacaaatagaagtcttaggctatgatagagatcctatcttggtagaacttatacaaaaccatcttgatgatcttgaagcacaccgatataaacctcttctacgtaaactccacattacta

SEQ ID NO: 4203 - DNA, 200 bp, Lawsonia intracellularis
tggaggaacttaaagaatatattgatataattcaaacacttgatcctctacctggagcaagttatggagagggagatcctacttatgtgagccctgatgcatttgtctatcaagttgataatgagttcattatattacttaatgatgaaggattacctaatcttcatctaaaccaagcttatgaacatattttagaagaa

SEQ ID NO: 4204 - DNA, 200 bp, Lawsonia intracellularis
tcaagtgacaaagataaagagtatttttcagaaaaaattcgttcagctgcatggctaatcaaaagcttgcaccaacgacaaagaacactatataaagtagtagaaagtattgtaaaatatcaacaaaccttttttaaagaaggtatcacaaagcttcgtcctcttatattaaaagatattgctgatgatattggtatgca

SEQ ID NO: 4205 - DNA, 200 bp, Lawsonia intracellularis
tgaatctacagttagccgaataactactaataaatacattgcaacaccatttggaatttttgaattaaaatttttctttaatagtgcacttggtgttgatgatggtagtcaagttggctctgaaagtgtaaaagctattataaaaaaatgtatcaatgaagaagatcctaaaaatcctctttctgatgaacgaattggtg

SEQ ID NO: 4206 - DNA, 200 bp, Lawsonia intracellularis
aaatcttgaaagaacaattaaaagttaatattgctagacgaacagttgcaaagtatcgtatgtctatggatattccatcttcatcacgtagaaaagtacatttctaactattcattataaataaaataaaaaaggattattatgaatattgtatttactttcaaaaactttgaaccatctgatcatttgcgtaaatatgc

SEQ ID NO: 4207 - DNA, 200 bp, Lawsonia intracellularis
acgacgtcgccttgaaaaacttactcgttttgtaggaaaaaaagtatctcttgaaatacaacttcttatggatgtcgataaatttcgacaaaaagtagaagtacaagtagtaggagaaggacttaacatatcagcagcagaaacaactgaagatatgtatggctctattgatctagccattgataaaattgaatctcaaa

SEQ ID NO: 4208 - DNA, 200 bp, Lawsonia intracellularis
taaaaaaatatactgcacgctatagggaacaaagacgcagtggtcgcaataaaaatattgatattttcccatttgaattaattgatgaagatggtgtacggacaattacaggacgagaacatttttctccaaaacctatggaccttgatgaagcagctatgcaactagaaacttcaggatttgaattccttgtgtttcta

SEQ ID NO: 4209 - DNA, 200 bp, Lawsonia intracellularis
aatgcagaaactgatcgtgttaatgtcatttatcatcgaaaaaatggtgactttggtttaattgatcctgttatttaatttattgttaaccatttttactttcatttacccaatgactttaaaaaaaataatacctaacctacaaaagacacaaaataataataataatagtatttcttctccattattacctcatacag

SEQ ID NO: 4210 - DNA, 200 bp, Lawsonia intracellularis
ttcaagaatattttccagtaattattattgtaggtatgtctggtgcaggtaaaagtactgctttacatgtatttgaagatctccagcttgtcacagcagatggtattccaccgtcactagttacaagtatgattcatacagttcaaagttcttcactagaacacgttcaagggttagctttaggtattaatcaacataga

SEQ ID NO: 4211 - DNA, 200 bp, Lawsonia intracellularis
atacatacaatgcaagagcttgaacatacttttcaagaaatgcgtagccaacatatttactttacgcttctctaccttgaagcagatatgcccactcttataaaaagatatgcagctacacgaaggcctcacccattagaacaataccatattggtcttgaacatgcccttgaagaagaagctaaacgtcttatccctat

SEQ ID NO: 4212 - DNA, 200 bp, Lawsonia intracellularis
aagacaaacagcagatattgtacttgatactacaacatattctattcatgacttacgaaggtttctacaaaaatcttggaacccttatccagaaaaaatacgatctattaaaattaacattatttcttttggatttaagtatggtgtacctaacgaagcggatttactattcgacctaagattcctaccaaacccatact

SEQ ID NO: 4213 - DNA, 200 bp, Lawsonia intracellularis
ttgtagaagagttacgtcccttatctggaatggacaaaaaagttgcaacttatgttcttaattctgcttcaggaataaaatttaaaaaacatcttattagatttctttcattccttcttcctctctatgatgcagaaggtcgttatcgtattactattgctcttggttgcacaggtggtaaacatcgttctgttgctatt

SEQ ID NO: 4214 - DNA, 200 bp, Lawsonia intracellularis
tcagaactattattacatgaacttactaaaaaaaactatactgtttctatagagcatcgtcatatggaactaggataactgctattatagtaaaacaatcagtataacataagaaaactcttgccaagcgtgtaaattacgcatatatacatcatacgccgaggtggtggaattggtagacacgctatcttgagggggta

SEQ ID NO: 4215 - DNA, 200 bp, Lawsonia intracellularis
gtgggcactccctgtgcgggttcgagtcccgccctcggcaccacccttaccctaggaagtttgttgttataactaacctagctttttagtagtgacttccttactcttttttctatttaaaacctacctgttaacgtatattcttttttactatctacattcaaatacatttagctacatctctagctataaaaacgcta

SEQ ID NO: 4216 - DNA, 200 bp, Lawsonia intracellularis
taataactaacgttaacttattaaaacgcatataataattataatgttagtgtaatagaatatcaaagacagtaaagcaatagttaagataaataaaaagttataagtattattattcaataaccaacattattatattaattggagtaattatgaaaaaactgattctaacttttgctttattattagtaacaaatata

SEQ ID NO: 4217 - DNA, 200 bp, Lawsonia intracellularis
actacttttgcttctgagccttttactctatcaagcccacaaatgaaaaatggaactattgcaactaatcaagtttataatagttttggatgcaaaggaaaaaatatttctccaagtctagagtggaaaaatcctcctgaaggaactaaaagctttgctataactatgtttgatatagatgcaccaacaggtagtggatg

SEQ ID NO: 4218 - DNA, 200 bp, Lawsonia intracellularis
gtggcattggatagtttataacattcctacatccacttcctcattagtactaggagcaggaaatgatcctaaaaaacttcccaaaggtgcagttcaatcaataaatgactttggttttattggatttggaggaccttgtcctccagttggtgcaaaacttcatcactatatttttactatctatgctctcaatgtagaga

SEQ ID NO: 4219 - DNA, 200 bp, Lawsonia intracellularis
caatggatttaccagcaacaactatgcctgcagctattggattcaatattcatatgcatatgattgacaaagctacttttactgctacttattctcgtaagtaataataaaaaacataactgatgcaccattatcgaatactagattatagaaaacttcagaacaatatacttttctttgtatttactttaataactata

SEQ ID NO: 4220 - DNA, 200 bp, Lawsonia intracellularis
taataaaattttctcttaacaacctatgtacgaaaaaattaatttcttcaacgaaatataaaaagaaaactatccttgataattcaaggatagttttctactagaatcttttttaattttaattagaattgatacttcatatttaaaccagcacgataggcattcttatcaacttctctttgaaggttccatagtttttt

SEQ ID NO: 4221 - DNA, 200 bp, Lawsonia intracellularis
atcaagttcaagacgaatatatgacagttcaagagctacacttaagtctttatagattttatattcagtatcaaaatctacttcccaagcataatctttctttgttaagtaaagcatattatcaccaccacgtgtgtcataaatggtagtaacgtatgataaacctaagtgttcaggaacgtctttattatttgtaccct

SEQ ID NO: 4222 - DNA, 200 bp, Lawsonia intracellularis
gaattctagctccacggataacatgagttagattttctaagaaagaaatatctttcaactgaactacaacaccccatgagccagcaatagtatttccaaaaacagaatctttgcctataccataggctccactatatccaaaacttgttgctgaccagtttccaactaatgttggtattcttttagaggcgccacgtgaa

SEQ ID NO: 4223 - DNA, 200 bp, Lawsonia intracellularis
tcaactttatctcctgaggcataccaacctataacccctggagttacatattcaaatttatattctgctaataatgctgcataccaaccttgacgttttaaatcaatcttatctagtaagaagtcaccaataacaacatttctaagacttcctaagtctgctcgtccataagcaccatcaacagctatatgcaaaggact

SEQ ID NO: 4224 - DNA, 200 bp, Lawsonia intracellularis
tgagccagcaagttcagctgataaaccaacccaccatgcattaccacgctttttatttggaaaaacatctccaaatggattaccagctccccagctatatccaaatcctgctggcattgctggtaaaagacctgctcttacatcttcaatatctccatagctttcccctaataagctcttcttacctgcaaaagcaaaca

SEQ ID NO: 4225 - DNA, 200 bp, Lawsonia intracellularis
taccccatggagcaatttttatatcagatattgttacaggaatagttaatccaactacatctaatgttgtacctttaaagttaggtagctttgatattccataattactatcatagtttttatgcaatgcacgcatccagaaagctgtagcacctaaataatcattaaatacagcagaaacagtaacacctgctccatca

SEQ ID NO: 4226 - DNA, 200 bp, Lawsonia intracellularis
gcatctaatattgtagaacctgcaacaaatcctggaaggacataaggttgtaaacccatacggacttgcacatctgtgtaaggaataacccaatcaacataggaataacggagctttataacatttttaccatctgttccaatagaagcaccatcaacaccacgtccccagatagtcttacctaattcaaagaatacaac

SEQ ID NO: 4227 - DNA, 200 bp, Lawsonia intracellularis
acccttaagactctctgatgcaacaatgtctatttgagtacgtaaacgttgtttaggcgaaaaacgttgatctccatcgcccttcataaaactagattgttgccactcaaaattgaagtcccacacaccctttgccttaaaatcaatagcttctgctgaaagcgatgctgtaagcaatgttccaacaaaaaggaatgcac

SEQ ID NO: 4228 - DNA, 200 bp, Lawsonia intracellularis
taataagcacttttttcataaaagtcttcctttctctagtttaaaaattgataccatacttatttaggataaatgctagatcattagcctaaaactgaaatagacctatcagtaaattctagttcagtcaacttttttgtactttttatcattaaaaatgtggagttattatatattataactgaaagcgtaacttatct

SEQ ID NO: 4229 - DNA, 200 bp, Lawsonia intracellularis
aatctagctaggacttcttttttcccaattactacaataagttcttgtaggcttggtcctcctaaaacaccagatacagctaaacgaagaattggaccaatctctttaaacttcagattgttacttgtgatatactcatggataagctgttcaatatataatggttcaaagtttatttcagcttctaataaattacgtaa

SEQ ID NO: 4230 - DNA, 200 bp, Lawsonia intracellularis
tctatctaaatgctctttactttcattagtgacaattttttttatatcatcttctttatatgtaagatctgaagcactaataagcacaggtttcataagataaactaattccttaagagtatcagctcgttctacatacaatggtaacactgcttcaatccgttcttttgttatatgagtaaaaccttcttttctaacaa

SEQ ID NO: 4231 - DNA, 200 bp, Lawsonia intracellularis
aaggtaacataaggtttgcaatctgggagactggtaatctccttagataatgagcattaagccaaagtaacttctctatattaaaagcagcaggagcgctatgaagatttgttccatcaaaaaaacttatcaactcctgaagagtaaaaatttcttgatcaccatacgaccaaccaagccggacaaggtaattgagcata

SEQ ID NO: 4232 - DNA, 200 bp, Lawsonia intracellularis
gcttctggtaaaaagccatcttcttggtattcaataactgcacgtgcaccatgacgtttagaaagcttctgacggtctgaaccaagaatcataggaatatgaccaaatataggtatttcccaacctagcgcattataaattaagatctgttttggtgtatttgaaacatgatcatctccacgaataatatgtgtcacttg

SEQ ID NO: 4233 - DNA, 200 bp, Lawsonia intracellularis
catatcatgatcatctacaactacagctaattgatatgttggtgttccatcagaacgttgtaagaccatatcgtcaagctctgtattttggactgtaacttgtcctttaacaagatcattaaaggtaacttgacctgcagaaggaacttttagacgcaccacaccagaaggattagcagataactttttctctctacaac

SEQ ID NO: 4234 - DNA, 200 bp, Lawsonia intracellularis
aaccattatatcgaggcttctcacctttttgacgggcttcctctctcatcttttctatttgttcaatagaacaatgacaccaatatgcatgaccagtctgcaagagtatatctatgacctcatggtaacgctcattccgttttgattgataaacaatttctccatcccaattcaaaccaagccatgacatggattctaga

SEQ ID NO: 4235 - DNA, 200 bp, Lawsonia intracellularis
atagtatctgtatattcttgcttagatctttcaaggtctgtatcttctatccttaaatgaaatatcccatcaaaatgcctagctaacaaccaagaaaacaaagccgtgcgtgccccaccaatatgtaattgtcctgtaggacttggggcaaaacgtgtaacgactttcttcattataatcctccatactacaagtaataa

SEQ ID NO: 4236 - DNA, 200 bp, Lawsonia intracellularis
cattacccatttaataaaatgattatttctatctttatgttctatgttataaagaatgttatcattctctaatttattattctttctctaaagtagatacccattcaacttttaatgcacctgaacgtatatctctctggtttcctggtaaaggcttacataatactcttgcacctgatggaataccacgtgtataagac

SEQ ID NO: 4237 - DNA, 200 bp, Lawsonia intracellularis
ataagagctaaacctttttttgtacaaacatattgagctgttcccatacctaaaacaggaaatcctccagaaaggaccctcccagttaaaaaagaagtagtattatctaatagtttcaaagtattctttctataccttaataactgaaaagaaaaacttactttaacttttgataaattagctgcttgactaaggtttaa

SEQ ID NO: 4238 - DNA, 200 bp, Lawsonia intracellularis
taaccattgtggtgcatctacatcaaacaagacatgacaccaaagattatttgtactattaaataaaggacaaaaagctgtatgtgtgcaaggagcaatagaaataaatgtatcttgtatagcaacttctcttaatgtagacataagctttccacccaaacgtgttccaggctctacaaacaatgctgctccatcagagt

SEQ ID NO: 4239 - DNA, 200 bp, Lawsonia intracellularis
gtaaaacattatttatgagcattaccatttgttccatacggcttctaataagatgatttgtttttccctttaattcattaagcatatttccagacataataaggtgcaaaggggaactaatagattttagtacttgggtataattaccacgtatcaatgtaacatcccacacaaaagattcttttagttgtgcagctatt

SEQ ID NO: 4240 - DNA, 200 bp, Lawsonia intracellularis
tgtttaaaaagtttcaaccctatattcataggttgaattgcagtatccacacaaataagctttattttgcaattacgccaggttggtttggaaagccacaaggccacaggtaacgttaaaggaccactacctaagtccataataacgacttcagatttaggttcaggtaatgcaagatttgatattagagacgtaagacg

SEQ ID NO: 4241 - DNA, 200 bp, Lawsonia intracellularis
tataagattccacgggaaaaaataccataaataagctgaacaaaaacgtgcattgctccaatatgatttatataaaccttttctttcagaggttaataaacaagaaaggttatgaatatcatcaggtaatgctattctctgtgagtgagaaagatgaagagtcttatccaaaatgtaaggtaaaatctctagtaattgtt

SEQ ID NO: 4242 - DNA, 200 bp, Lawsonia intracellularis
ttgtaaaaggtgttaaatctgaaataattggttgaaataacggctgttgctgtttattcctcaccttatctaacttacaaatttttcctcccctactgtaattaagtcttgctttactaatattcatccttttttgattagtaccttttaatacctgcttagcaaatagtaattcatttttcacgatgaagcagatgcct

SEQ ID NO: 4243 - DNA, 200 bp, Lawsonia intracellularis
caagtgcagctacagctggtaaaattttgccttctaacatttcaagaaaagctcctcctgctgttgaaacataatcaaccttatctaaatatccatatttctcaagtgcagcaatactatctcctccaccaacaactgtatatgcttttgtttctgcaactgcatgggctataatttttgttcctaaaccaaactgatca

SEQ ID NO: 4244 - DNA, 200 bp, Lawsonia intracellularis
atttcaaaaacacctactggaccattccataccacagttcctgcattcattatgtattcagcaatcctctgagctgtttcaggacctatatcaaaaattttctcatcaggcttaatatcatcaactttacgtattattgcagttgctttctcactaagttcagttgctacaactacgtcactaggcaatggaatagatga

SEQ ID NO: 4245 - DNA, 200 bp, Lawsonia intracellularis
tattcccctagaatcttctttccgcgttgtttcacctaaagaatcaaatggtgacatatgctgagaaacctgctctatcactttagctcctaaagtttcaaaagggaaaccttgtttataagcatttgccatcaacttaccccccaaatgatcaaaaggtgatacatgtcgatgtgtttctctcataatttttgctgctg

SEQ ID NO: 4246 - DNA, 200 bp, Lawsonia intracellularis
ttgaaaccaattctggttcatataaagataaaccaatttcaaaaccagcagcttttaaaaatgtattagcgatacccccaccaacaatcaatcgatccacctttcgagaaagattttcaataagttgaagctttgttgaaactttggaacctccaataattgctactaaaggatgatttggacgatgaagaatatgtcta

SEQ ID NO: 4247 - DNA, 200 bp, Lawsonia intracellularis
atagcttttaactcagcagccatcaatggaccaacacatgcatgtttggcaaaacggattgcaccttctgtagatgcttgtgcacgatgcgccgtagcaaatgcatccataatataaatttctccaagtgcagctaatttacgtgctaactcttctgaatttttcttttcacctacaagaaaacgtacattctcacacaa

SEQ ID NO: 4248 - DNA, 200 bp, Lawsonia intracellularis
tacacactttcctggagatactgttactccatttaagtaatctgtaatcaagggaacatccatacctaacaattcagaaagccttgctgcaacaggtgcaagagaagcttcttttgtaggcttaccttcttctggtcggccaagatgtgaaagaatcacaacaccagcgcctctttccaatgcaaacttaatagagggta

SEQ ID NO: 4249 - DNA, 200 bp, Lawsonia intracellularis
aagctgcacgaatacgcttatcactggtaataacaccatcttttaatggtacattcagatcttctcttaatacaatttgttttccttgtaagttaagttcagacatggagcacatatgcatattgtcttctcctttattagaaaaacttataaaaacagttggcttttactgttccctaactgaatgttttacctaatct

SEQ ID NO: 4250 - DNA, 200 bp, Lawsonia intracellularis
aattttatattacataatattaggttgtagcaataacttctaaaaaatagactaccacttacttaaggaactgatagattcttattactacttcttaatttgtaaaaaataaaatatagtagaatctttttatttaatattttataaaaattgatgtacaacacccaaataatatataaaaaatgtaaaaagggcggtat

SEQ ID NO: 4251 - DNA, 200 bp, Lawsonia intracellularis
tagaataaataatagtatgatattcaagaattttttgtactaacctttttacttcatgcatactttaatataacctctattttttattagtcatgtaatttaatgtccccctttggagactataatggatttacatattattactgaacctctcattgatctttacgacagagttgcttttttttggcaatcaccaaaaa

SEQ ID NO: 4252 - DNA, 200 bp, Lawsonia intracellularis
cacaaaaaatatcttctattattattttagtcatctttctctgtgcactagctagtatagaacttaatcgagaaggataccttcctaaaaatctatcaattatagtaccaacaaatcattttagagctattagcttagcgttcacatgtatattatgtattgaacttattgctttggtccttagtatttcacaatctctt

SEQ ID NO: 4253 - DNA, 200 bp, Lawsonia intracellularis
tcaatctctgtaggaaaacagcttgaaattatggcactgattttattacgcaatgcatttaaagagttagcatatttatcagaacctattaatatgaatgatagtgcatatcacctatatacaatttgtcttgcagctatcacatctcttggaatttttatatgccttggattttatcaacatatgccaaaacttacaaa

SEQ ID NO: 4254 - DNA, 200 bp, Lawsonia intracellularis
atatatttataatcctagagaacggttaggttatattaatgcaaaaaaaatagttgccctttttctcttatgtcttctcacagttatagcaattcgtgacacatatcaacatcttattacaggaaaagatgtagctttttttgaaacagtctatactgttttaatctttgcagatatccttattgtacttgttgcacaaa

SEQ ID NO: 4255 - DNA, 200 bp, Lawsonia intracellularis
ggtttatgccaacatttagtgccatttttttacactcttcctctgttgtagcaacattaattatgaggctttctctgtctgcaaactcaccatggaatgcaataggagctatgttctcaggactatatattcttgctgttacctgggctataacatactttatgaaaaaaccattctctataagaaaaaacaaacatata

SEQ ID NO: 4256 - DNA, 200 bp, Lawsonia intracellularis
gtagactaaggaataactaccaccaacttttatactatctacctattgttataaaaagtggtgttacaaaagttggagtgccaattccatgcacttgcaataatttgatcaatatttgaatattgtggcctccatccaagtaaggaggctgctttttgattacttgagattaaacatggaggatcaccttctctacgctg

SEQ ID NO: 4257 - DNA, 200 bp, Lawsonia intracellularis
gcccagtctatatggaactgacctacctgtaatcctttcaacactatcaataatctgccttactgaaaaaccacttccagtaccaagatttatggcctctgaggtttcacctttagctaaataatttaaagccaacacgtgtgcacgtgcaagatcacaaacatgaatgtaatctcggacacatgtaccatcttcagttg

SEQ ID NO: 4258 - DNA, 200 bp, Lawsonia intracellularis
ggtagttatccccaaaaatagttaatggagtattacttgtaatagtttttaatattaaaggaattaaatgtgtttcaggttcatgccactctcctgtttccccatctagatcacaacctgcggcattaaagtatcgtagtgaaacccaagaaagaccgtatgctgcttcaaaagacttcagcatagattccataacaagc

SEQ ID NO: 4259 - DNA, 200 bp, Lawsonia intracellularis
ttacttactccataagtagttacagggagctttggcatatcttcatgaataggcatttgttctggttgcccataaactgcacatgttccagaaacaacaatatacttaactttactattgtatattgtttctagaagattcagtgtacctgtaacattattacgaaaataatacccaggattgctcacagactcactaac

SEQ ID NO: 4260 - DNA, 200 bp, Lawsonia intracellularis
aatagattttgccgcaaaatggatcacgccatctggtttatgcttatgaaaaacagactgtaatctagaaagatctaaaatatctccatattcaaactcaccccactgaacaagggacttatgacctgtagacaaattatcatatacaataggattatatccctgacgtgctaattctttacatgtatgacttccaatat

SEQ ID NO: 4261 - DNA, 200 bp, Lawsonia intracellularis
agccagctccaccagtaacaattaccttcatatattcctaatgtttatatagctaaggctaactaatgttaaatattcatatagttatcagttaaaaaagttagtaacattataaattaatatttttatggttagcaagaaggaactaaaacaaaaaactctttctttataggatcatattgtaataactcacctgatac

SEQ ID NO: 4262 - DNA, 200 bp, Lawsonia intracellularis
aatatcaaaataccaaccataaactttgaggtttgatttttttacagcctctttaacccatgggaatgtcaaaatattattcatagaatttacaacactaaactgttcacatgctttttgtctaacttcaaaaggagcattaggaaatttcttctcagcaagtatcttagcaggcttagcaatactcatccatctatcaa

SEQ ID NO: 4263 - DNA, 200 bp, Lawsonia intracellularis
tgaaactttttccagtatagcttcctggtaacaataaactatgaattcctccacattttgcatgtcccataataataattgtatctacatgcaagtgctctacagcatactcgattgcagaagtgacaccatgataacttccatcctctttagtacatggagggaccaaattagatatattacgaactacaaataaatct

SEQ ID NO: 4264 - DNA, 200 bp, Lawsonia intracellularis
ccaggcttagcttctgtaagaatagcaggatcaacccttgagtcactacaagaaataaaaagaactctaggttgttgtccttcactcaattcttttttatatggtgagtcaggattacaaaagtgaagcttttgaaaacgacgaaaaccttcttctaatatttttactgcttctacattgttaagagattcctccataga

SEQ ID NO: 4265 - DNA, 200 bp, Lawsonia intracellularis
cttaccttttatgcttttttgtgcattagcaaaatttggtggtataaaaaaaactatacatccccaaaaaactactaaatgtatactgatataaaaaacttttttcatagctattacaactaactctcttttatttatttaactttcttttaaccttaacacccttttttatttaaatataataaataaaaactttaact

SEQ ID NO: 4266 - DNA, 200 bp, Lawsonia intracellularis
ataaattaataattaccattctactagtagtatattaatataaaataaaaaaattatttcattacaatacaatttattatactaaccaaaaattttagttatagttttaaaaaaagtcaatttaaaaaataggttagtggttttacttgtacatatcacaaacagaatagatttattaacaactatttcaggatatatat

SEQ ID NO: 4267 - DNA, 200 bp, Lawsonia intracellularis
atatatcatccactaacttaaaaattagctgtattaatgaaaaatacaatatagagatatattgacaaccaaatgactcttgtctaactcatacatataataattgggctgtcgttcaatggcaggacagcggattctgactccgttaatcaaggttcaagtccttgcagcccagccatatccacccctatactactatc

SEQ ID NO: 4268 - DNA, 200 bp, Lawsonia intracellularis
ataaatactataaatattaattcaacattttctactttttctttatctacacatagttccttctaactacttataaaaaatgtgtataactgttattatccgctagttatatctagtaaggaataataataataatatattaaaataattaactttttattattttattactataaatgcatggcaaagtactatcatta

SEQ ID NO: 4269 - DNA, 200 bp, Lawsonia intracellularis
attttgtatacccccttctcaactactaatacttttgaattaatactattaacgaattatttcgttatgttactctttttactataaagaattttgcattttttcctattttatactataatatatgacatatattttcttgttataaaaaaatattttctttaatatattacatcaactctcaataggataatattagt

SEQ ID NO: 4270 - DNA, 200 bp, Lawsonia intracellularis
taacccgccaagtaaattggaacttgtttttcatgtctaacaaaagcaaaatagatcctattattactgtaaaacaactttgtaagtcatacccactatataccaaaaaacaggatcatcttcttgaactttttgatccttttagaaaacagcgtcatacactttttcatgcacttaattctatctcattttcaatttat

SEQ ID NO: 4271 - DNA, 200 bp, Lawsonia intracellularis
aaaaatgaaagtattggtataatgggtattaatggttcaggcaaatcaactcttttaaaactattaacaggtgtacttacaccctcttccggggaaatatccgtaaaaggaaaagtatctgctttactagaacttggtgcaggttttcatccggaaagaacaggtcttgaaaatatctattttcaaggagcacttcatgg

SEQ ID NO: 4272 - DNA, 200 bp, Lawsonia intracellularis
acaaacaaaacaagagatagactcttaccttgcagaaattatccagtttgctgatattggagagtatatccatcaacctgtaaaactttactcaagtggaatgtttatacgattagcatttgctactgctattcaaggtaacccagatatcttgattatagatgaagcattagctgtaggagatgtacgtttccaacgtt

SEQ ID NO: 4273 - DNA, 200 bp, Lawsonia intracellularis
tatgctttcaacgtattgaagaattaaaacaacaaggggtaactttcatttttgtttcacactctagcgatcaaattgtagcacactgtagtagagcattactacttggaaacggtcaactcattatggatggagaaccacgcaatgtagttaatcgctatatggatattttatttaatcgtaatgataaattaagcaac

SEQ ID NO: 4274 - DNA, 200 bp, Lawsonia intracellularis
acaataaaagcaaatgttactctccctgagagcataagcaccgttacagaaaaaccaactgagcttactactaattatgacctaaaagataaagaaaaacttaacgacccttactcattacatccctggtataatccttatgaataccgatggggagatggtcgtgcaactatttcagatattcatattacctcatctgg

SEQ ID NO: 4275 - DNA, 200 bp, Lawsonia intracellularis
aaatataaataatgttcagcctggtgactacttatctattcaactaaaaacagtatttcacacatccattattagacctatttttgggtgtaccataaaaacacatgatggtattattgtatatggctcaaatacagagctaacaggttctgaaatattatatgaccatgtttctgctggatccataacatttgttactt

SEQ ID NO: 4276 - DNA, 200 bp, Lawsonia intracellularis
ttactatgcattgcaatttagcaccaggagactactttttctcatttggtgttgctgtaatggaaaaagatactgtacctcttgatagacggtatgactctcttcttttaactgtgcatggccctgcaaacttttttggtcttagtaatttaaatatgataattaggaattcagggattaagcatgtataatgtcttatc

SEQ ID NO: 4277 - DNA, 200 bp, Lawsonia intracellularis
acaactatataattatcaagctgaattgaatatttggcagtgtgacactccaaaaatatttaattattctgatggagatgaaatagaagataggttgtataccatactaaaacaagtggaagataaaagtatcctctctgatgaactacaaactttccaaaaagattgggccactacctatcatttatctgcctccagag

SEQ ID NO: 4278 - DNA, 200 bp, Lawsonia intracellularis
ccaacttattacgcccaattgaaaaaacattgttaaaagatgccactgtattagagttaggttgtggttgtggaggaataactcgctaccttgcagaaacatgtgcacatgtatgctctgtagaaggaagtcaacgtcgtgcatcaattactgcgttacgctgccaagacttaactaatataactatcatatctgactct

SEQ ID NO: 4279 - DNA, 200 bp, Lawsonia intracellularis
atttatgatctgtctcctaaaattgggtcttttgatattgtaacacttattggtgtattagaatatgctcgtctttttggtggagaatatgcagaaactcgtctattaaaaaaagcttgctcttttcttaaaccaggtggtgctcttattattgctattgaaaacaaacttggactcaaatatattgcaggtattcctga

SEQ ID NO: 4280 - DNA, 200 bp, Lawsonia intracellularis
agaacatctaggaacatcatggactggtgttatggatggatatacttcagatggtatagttacattcaaccgtaaagaattagaagatcttcttatccaaactggcttttcacaactccaacagtttatccctttacctgactataaacttccaactactgttttacacccagaaggtattgtagcagaggaaaaagaat

SEQ ID NO: 4281 - DNA, 200 bp, Lawsonia intracellularis
ttcaacgtgcaccactaattgctgcttcctctagatcatttgaagaaaaacccctttttaatattcaacaagtttggaagggtatctgtaatactaatatgttagctaacatggctgactctctatgctttattgcatggaaaacttatgaatcagataaaactatacatagctggcccaaaaatattctagcttcacat

SEQ ID NO: 4282 - DNA, 200 bp, Lawsonia intracellularis
tatggaacattcattcaaaaacaatacgccaaagaaactcaatttattcgttcagatgatggtatacaagtattacgccgacacttaataccaggcttacaaaagcctaatgctatcttttcacaactattagaagaagaaccttacataaaaggagaactccttatagaaaaagtgagacagcttatggtaaaatataa

SEQ ID NO: 4283 - DNA, 200 bp, Lawsonia intracellularis
ctggacaattgaacaaattgcagctgtattacaaccttggtttagttggctttgttcacaatgtattcctggtacaactgatttaccagccgaactacaagatatagcaccttttaatgttgtccttgataaagatggtgctatcaatcctatagatatagagtggacaagcatacaatctatccctttattaacaatgc

SEQ ID NO: 4284 - DNA, 200 bp, Lawsonia intracellularis
ttgtacgaacactatcatcaacattcatccgtataggtcaagttgctcctcctgcaactaatgtccctttgaagattattcccctacttcatcaaactatttgcatactatataaaccaatatcaatggactctattcatgcagcatgggaagatacagaaaataaagttacatgttatctaggagtagattgtccatgg

SEQ ID NO: 4285 - DNA, 200 bp, Lawsonia intracellularis
gaaactatgatccatgctgagttgtcagttattcctaatatgcccctctccatgattcaatcattaaagacagacctatgttctctctcagaagaaaataaaaatcttagagaagaactaacttcatgttataattcccgctcatggaagcttacaaaaccattacgtttttttagtaacaagttacacaattatcgtgc

SEQ ID NO: 4286 - DNA, 200 bp, Lawsonia intracellularis
agttattaaaaatttttttacttttaacatgttactttttataattatcacatattagtatcacattacactactagttacacctctaactaaataatgactctatcttccaagatatattcaagctataattcatactttttacttattccccctacccttactatgctaaactatattaaggataactagtatgaatt

SEQ ID NO: 4287 - DNA, 200 bp, Lawsonia intracellularis
accttataaaaattggatcttaattgtatctcctttaaaatattgaaagaagtatctatgctctaaaaaaataaataatatttacccttattaaaaagagtgttatgggtttaactacattgtatgaattgaaaccaattattttttgtttccaatgtaaatttattgcatgactatcattgtacaatattgtatcctct

SEQ ID NO: 4288 - DNA, 200 bp, Lawsonia intracellularis
gatatttatttctattatttagaattacatattgtatatcttggagacagtatgccattatttacccgttcttactctactttttggctaactcttaatttagtttttttattactacctgcttgtggaactaaagaaaaatcacttcaatcaaatgaactcctctcacaacccatagaaagtcaagataataccacctc

SEQ ID NO: 4289 - DNA, 200 bp, Lawsonia intracellularis
aaagacagaactacctaaaattagtcttatcaaacctacacaagggaaacatatttcttctgaatttggaatgcgtagtcatcccataaaaagaagacaacttctgcacaccgggatagatatatctggaaagcgaggggacaaaattatagcttcagctaatggaactgtcgttttctgtggacgtagaggctcatatg

SEQ ID NO: 4290 - DNA, 200 bp, Lawsonia intracellularis
gtcttacaattgatttagacattggaaatggtgtaatattacgatatgctcatcttgatagattacatgtcaaaaaaggtgtagaagtttatcaaggacaatgtattggaaaacttggaagaacaggtagagcaactgctcctcatttacattttgaagtccgtgtaaataatatccctgtagatcctatgcaatttatt

SEQ ID NO: 4291 - DNA, 200 bp, Lawsonia intracellularis
ataccaacacaccactggacaaaaaaacctcaaccacccagtactacaacaaaaaaagaaatgtaatttccattcattggtaatagagtatatagagcatattatgactcaaagcctccctgtattaatgtatcattatatatccaattatcctagctcaataagcgtatctcctcataattttgaaaaacattgtcaag

SEQ ID NO: 4292 - DNA, 200 bp, Lawsonia intracellularis
gaatggcagaaaatggttggagaggaataactcttcaagaagctgaatctttttttctaaaaggagaaaaacttcctcctaaatctgtgctcattacatttgatgatggttttttagataactttgtctatgcatggccaatattaaaaaaatatgaacatagtggtgtcatttttactgttactgaacgtattctatct

SEQ ID NO: 4293 - DNA, 200 bp, Lawsonia intracellularis
gaacaaattgttagacctacactttttgacgtctgggataaatctatttctaataaggttctttatgaacttgtagatatgcctataaaacaaacaaaacttggactcaaaaaaagacaagatgtatttctttcatgggaagaatgtcgtataatggaaaaaagtggtgtaattagcattggtgctcactctgcccatca

SEQ ID NO: 4294 - DNA, 200 bp, Lawsonia intracellularis
cctttctgtttttgctaataacacatggaaagatatatatattccttcagatcagcatagaacattctataaaattgatgctcctatagtatggggaatgccatgttttaaagaaaaatctgccttacactgtaaggcatttattccttcgaataaacttactgaacttattacctatcatgtaccacaacaaaaacaac

SEQ ID NO: 4295 - DNA, 200 bp, Lawsonia intracellularis
aagcctatgaatactttcaacaacctcataatataacaagcctgaaacaaaaaattcaaacactttcctctaactctcttggaagttttgaaacatggggacaacagcaaaaacgtcttatttcagactttgaacaatgtaaaaatactcttgaaaaagaactaggacataatgtgcaatcattctgttggccatggggt

SEQ ID NO: 4296 - DNA, 200 bp, Lawsonia intracellularis
gaaagttcaattattgctcaacgtattgggaaaaattttggcttttcatatttttataaaacttctatgggagcaaatccatcaaaaaaatatacggctattaatcgttttaaagtcagaaataaaggatggaactggttacgttggcgattagaaatatattctcgtataatgcctgcaactgtgtatgcaaaaatacg

SEQ ID NO: 4297 - DNA, 200 bp, Lawsonia intracellularis
tatctaaatttagtcactaagtaatataaaaacatttctatttattacaacttctatctgttatttgtagtgcttgtaaactttcttttgatgcctgtatagctattgctacaagaataggtcctgctactattccaacaggtccaaacgctgcaagaccacacaaaatagataaaataagagcaataagtgttgcatct

SEQ ID NO: 4298 - DNA, 200 bp, Lawsonia intracellularis
atacctgttttcaaaaaaaacggccttaataagttatcaacgcctgcaacaacaataacacaccaaataatcatggcaaccatagctacagtctcaccttgaagccaaagccaaatacatacaggtatccagactaatgacgtacccacaaaagggattggtgctacaaaagctgtaatgagtccccaaaaagcaggctg

SEQ ID NO: 4299 - DNA, 200 bp, Lawsonia intracellularis
tggaacattagccacagcaaagccaataccacatagaaatccttgtattatagaaactaaaactatacctactaatacaccaaaaatagcatttcttattgttacaataaatcgattaagtacttcataagaaaaattagaagtaatacgaatcatagtataaagtaattctgcatttgtaatacataatacagtaacca

SEQ ID NO: 4300 - DNA, 200 bp, Lawsonia intracellularis
taataaatataaatatagttaatactgcatgaaaagctccacctgcgattcctaaaccaccagctaacacagaccttgttactgaccctacaatacctgctatgctgcttgccaactgtttaaccccaccttcaagaccaggaatttcttttaaccacctatcaatagaatctaacatttgatcagcattaatactctgt

SEQ ID NO: 4301 - DNA, 200 bp, Lawsonia intracellularis
aaaaaaccaggttcacgtaattggtcaagaatttttaaccctgctacagcctgagggacaataagagatatcgttattattaaaggtaataaaattaataggctaagacatatagtgtaaattacaattgcccaatatcgagaaattttctgagtaagcttaagaaaatatggatatgaaacacaagccatacttgtagc

SEQ ID NO: 4302 - DNA, 200 bp, Lawsonia intracellularis
taaaaatgtagtaactggaaaaggccataaaagtaaaaaccaagcgcctatactcaatagtgagagaattcgtgtcatattataatgtctctttacccttttaattactatggtaacatactgttaatacacaaaaactgtctaaccaagttactatcctcccacacttctatctatagttcaaaaaaattttattgaag

SEQ ID NO: 4303 - DNA, 200 bp, Lawsonia intracellularis
atatatctaccatagtaatagattaacatttctcaaaattatatctatagtatataattatattatagtatatagtgatagcatgacattgccaatacctaaaaaaatcagaaagttacaaccataagaaaaggttaaaatacaaagaatagctatcttgtttttctataaaaaaacatatactcctaccgattaacatt

SEQ ID NO: 4304 - DNA, 200 bp, Lawsonia intracellularis
agtaaattaacattagtaaaattttactaacttactattctagttattataataaacaagggggacgcactggtttcgacggggatgtggaaaccaaagtggcaggtcgaggcgccgctggcctcgtaaaaagcggcaacaatgtaattgcaaacaacaattacgactacgctcttgctgcataagtaatagcgtacctg

SEQ ID NO: 4305 - DNA, 200 bp, Lawsonia intracellularis
gctatttaaatagccacgtcaatcctgctgatgtctgataagctggtgcggcgacaatcatcaggctagcagcctattgtgtttactggatagtctgcgaaattattacagtaaacttgttttgatctgcctggctaagggctagaatcaaaataagatgtaaacttagcctaaacctgtagatactttgtgtggaactt

SEQ ID NO: 4306 - DNA, 200 bp, Lawsonia intracellularis
tctcggacgcgggttcgattcccgccgtctccaccatttttttatccagagacatccaaataaatacgtaacaatttaaaaatattgattttttagaaaagatctatctaacaacatctaataaaatccattgacatattacaagtttttggggttaactttacaggaaatgaaaaaataaagttactcccccccccccc

SEQ ID NO: 4307 - DNA, 200 bp, Lawsonia intracellularis
caaggtttactttttatatgtatagtaaggattaaacaaaattctatatgcccttaaataatatttttattaaaaagcttacaccacaaaaaacaaagtaagttttccaataatagtggacttttttattagttagtctttcagattggagcaggataaaatgatgctaaacagtgtagatagaatggtttaataagata

SEQ ID NO: 4308 - DNA, 200 bp, Lawsonia intracellularis
gcctttgaggttcaaatatcttttgaaggaaaagcctcagaaacattatttacaactacgttcttaaacattgaggattgtattactactacatttactagaggcagttctacataaaggaaaaggcttacatcctattactattgatactatcgtgaatatagaaaccaggtaggattaactcaatttgtatattgatt

SEQ ID NO: 4309 - DNA, 200 bp, Lawsonia intracellularis
tccttttattatatgtttttctatattcatatcgaataaaggtaaaaattgtttagtcatagatgtaagctgagaatagtcacttatacttactaaaccatcatattgtttttgatactcagggattagccaatgtataattccagccttttcttcttctgcttgtatgttatataactccattaatcgtgataatgctt

SEQ ID NO: 4310 - DNA, 200 bp, Lawsonia intracellularis
catgagttttaatatcctttggccatccataggcttcagccacagcttcatcaagttctgtatggagccttaataaattatagatatctccttgaaggcttatctttgactccttagaagataatggaacattatgttgtaccttctccataatagcatacatatgtgtaagtgtcaaataaggatattgtttttgtctt

SEQ ID NO: 4311 - DNA, 200 bp, Lawsonia intracellularis
tctttacggtgtgtatctaacatgttggcaatagaacggatacgattcttttgctgttctgtagcttgaggaaatggaaaagtatcaaaacagattttattatatacgtcattagtattaggtttaagacctcgacttgtggctgtgacagtcaaccagacgctatggaatttacttgagagtatccctaaaatatatgg

SEQ ID NO: 4312 - DNA, 200 bp, Lawsonia intracellularis
atcatcgctagcaataacagtcagactatcatcaggtactactagtttatttataaaggcaaaatacctcctaccagcagttcttggagtagctatatattgtttaaaattattaatggcatttcgtaagcctattccttgcgatccaaataaccaccagtgattcctacgaaatgcaagtctattcttttcccgaatag

SEQ ID NO: 4313 - DNA, 200 bp, Lawsonia intracellularis
gttttactttagtagcaatccattgatatatagtaggatagttctgttggacttcattaatacttagtccaaataaatctatgacatatgtattctttgatatccctgctaaatctctacctttcatatagggtttaatatacttttctaaccctgggattgttcctaatcctaatttttttgcctcatctagtgtaata

SEQ ID NO: 4314 - DNA, 200 bp, Lawsonia intracellularis
ataaagtgttttcctctaatactgacacctgaccatgctatgcctttattagcctttaaaggtacaagttttgtagtatcaacatcaacagaaagattagcatgtattttcccttgtgagctattaaaagtaacctctacaaagccatcttgttgtttctcatgtatggatgtatataatataccttgtttatcacctaa

SEQ ID NO: 4315 - DNA, 200 bp, Lawsonia intracellularis
agagcaggttgtcatagcaatacgaactcgagcagcatcttttgctccagtccaaggatgatcaggtatagccatcactattgatagttgaggcttattctctagataagactcaactatttttctattagacggatttttaatactgtttgttgttataaatccaaattggcgtactttgttctccctaagtaacaatg

SEQ ID NO: 4316 - DNA, 200 bp, Lawsonia intracellularis
ccgaacgatgccaccaatacatcacatagtctatattctttggtaacattggataagcagaacgtaatgcttcaacatagccgtctcctagtgcagatcttatacgattattaccgataaaaggaggattcccaacaataaagtctgctttaggccaaggatctgctggtctaggatttatatatgtttcttgaatattt

SEQ ID NO: 4317 - DNA, 200 bp, Lawsonia intracellularis
cctaatgaatcttttccttttttgatagaatcccatgtaagaatagcgtccctacattctatgaattggatgttatccataatcggttctggtggttggacattcccatatactttataatgtctttgtaagtaacttatccataccacaagctcagatataaatgcagcacgaggattatactcaatacctttaaactg

SEQ ID NO: 4318 - DNA, 200 bp, Lawsonia intracellularis
ttttggtgttatagagtagcctttcttttgtatctcattttcagataaccctaagtctttaagggattgtactacctcaccctcaatatcttttaatacattcatagaaacagctaaaaaattcccacttccacacgatggatcaagaacaatggtttcacttaatcgtttatggaaaacttctatttcttgaatggctt

SEQ ID NO: 4319 - DNA, 200 bp, Lawsonia intracellularis
ctttatgactccctttgacaacatgagataaggctaagagttttacattttcccaatcttctctaacaggatcaaccactgtcggaataaccaaacgttcaacataggctgttggtgtataatgggcacctagcttgtacctatcttttggagataaggcacgttctaataatgtaccaaagatacttgtttcaacgcca

SEQ ID NO: 4320 - DNA, 200 bp, Lawsonia intracellularis
ctccaattagctttagctgctttatagattatagctaattgttctttatttaaaggtaatgcctcagcgtcttcaaataaatggccatggaagcatactacttgtttacccaaagctgttgagtttcctcctgtcttcatagctttccatacgtctgtagtagctgatgcaaattgttctggagtcttttcaagtctagc

SEQ ID NO: 4321 - DNA, 200 bp, Lawsonia intracellularis
caataattgtgtgtaagaattaaaaggtagtaagccacaatcctcagcaaataatgtgaaaatgagtctcataataaataatgccacaacatctgggtcatgtccttcattttctaaggattgagctaagtcagataatgttaacacaagctgataggtaactttttcattttctcttgaagggtttaatgaaagaggat

SEQ ID NO: 4322 - DNA, 200 bp, Lawsonia intracellularis
ccgtccaaatctttctaagacgttcacgtatttcaggctttcttagatcttcaaggaggatagtgttttctcttgctgatggatatggagcatagaatcctgtatcattaaaatcagcatagacttgtattgtatgaccaatatcagcaacaatgataaatggaggatgtccttctttagcaggaagagcataggcatac

SEQ ID NO: 4323 - DNA, 200 bp, Lawsonia intracellularis
ctttcggcttggattcgagcagcaatcatagcagcatcccaagcatgggtacctctaatagctgttccacgtctgtggagacctttattttgagatgttgatttatagctaccttgtttactttcccaaataaaacaaccacgtttgtacaagtcgatccttcctgttgttatttttccatttttgtctgttaaaataac

SEQ ID NO: 4324 - DNA, 200 bp, Lawsonia intracellularis
aggcatttcaaatagatatgtgttatcaacaagtgtagctctaggtgattcaggacgtgaaatctcaaggagatcacaaagttcaagtaaaaaagattgcgaagagcctaattcacttcctccagaaggcgcccattttgcaataaaggcctcaataggaggtaattctattgaaccttgcgatacaacaggtgaaggat

SEQ ID NO: 4325 - DNA, 200 bp, Lawsonia intracellularis
aaaaaaaaataagtattattaacaaatatactaagttagtacctatcaatctatagtaactcataatcgtatagctaaaggctttcctcaaaacaacttattgtaaagattaaataatacctatttttgttattgaaaattttaacaacaattttatccttaatcttccctttcaagataatctatacactagcaagtct

SEQ ID NO: 4326 - DNA, 200 bp, Lawsonia intracellularis
aataacactgcgtcctcttagattcacaaaacatagactagttagctcttttaaaaagattgaaagttgtcagctagaaaggaagaataaagcttttcttataaccataagcatcttatctctactttttacataaaaatgataggtaacattctaactaataatagtatgaaattaaatataggggtaattttaggggt

SEQ ID NO: 4327 - DNA, 200 bp, Lawsonia intracellularis
aacttaaaaatagtgatcaataaaaaatcaataattacaaataaataaattcaatggtcgctgtcccactttttgtccaatactccccagtatatgatgatcattttgaataaaaatggcctggagataactctaggcctatgttttacgcttttgattgtaaatcaaagtccacaaccaataagcaaagacgatcaaac

SEQ ID NO: 4328 - DNA, 200 bp, Lawsonia intracellularis
atacccaacggtggctccaacattgtttctgcaatctgattcaataaataaccatctatcttttattctgtatcaaaatattgcatcaatatttataacatactgaatttacaataagtttactcaaacatttcctgccaactacttgttttatacagacaaagcatctcctgctcttcctcaacaatgaatccaggcag

SEQ ID NO: 4329 - DNA, 200 bp, Lawsonia intracellularis
ctggtagatacaatattctactgccctcttttctgttggagtatattctctaggattagaagcagcagattgtatagtttgactaacagcaagcaatacttgagctgtttcttctagctttcctactaatgtgttaaaatctagaatggatggatgtaaagaagactctgaagtcagaattgattgagacataacactct

SEQ ID NO: 4330 - DNA, 200 bp, Lawsonia intracellularis
cctgatagtttttgtataaaatccacaaactgacagagtgggaagaccgctggtggaaagtattttgagcgcttcagcagacaaaatcataagaataacaagaaagggtcaagatgtaacgacattcaacataaaataaagtttgttataaagataagcttatctaccatttataatcctatagttacatccacctaaag

SEQ ID NO: 4331 - DNA, 200 bp, Lawsonia intracellularis
ttgactttcaaagtatacaataaaaaaagctttattagtctattgctagttaataaaaaatgaatatatatttatatatgttctgtgaaaaagaacatgttactcatctcttacagaaatactctatcaataataccagtaggtattagtatgtaataaagtattccattaagacccccactatactccttgaatataca

SEQ ID NO: 4332 - DNA, 200 bp, Lawsonia intracellularis
tactttactgtatatccaatttaatacagctgtacatcaagtaaaataaaactatcaataaggtgtctatcatgaataatatctataaggtattaactagtccttcatcagcttctctacttgtaatcttagaagattctgctaacgtaaaaattcaaaattctttttggagaagatataaaacagctatgggtcaaggt

SEQ ID NO: 4333 - DNA, 200 bp, Lawsonia intracellularis
gcttcctgtatagtttcaggatttttagctgcattgggagccatatcttgtgcatgtatcaattgttattatgcaataaaaagagctataactgagacaatattcagtaaaccttataaggcgtgtttcaactttgaagatgatgaagatttatgggaactagataaccaccatgatagtactactcatactgatagtac

SEQ ID NO: 4334 - DNA, 200 bp, Lawsonia intracellularis
aaaacaaaaaatcttatttatctctaaagaataaaatacttactctataaaacttattcatttttctatataaatatgatatcataataaaagttaatctttcaaaagaaaggacactattaaaaattactttagatctacaataagaatgactatcatataaagaaataaataccttaacaactataggtaaagggcta

SEQ ID NO: 4335 - DNA, 200 bp, Lawsonia intracellularis
tagttgtatctctatttaaatagctctatataaccattctattttgataattatacgattattatacgtataggataccttttaaaaaagactgcatagaatattctatagttagagtgtatcttattttttctatatcttactttactttgatgctactggtgtagacaataaaaatttaccctgaattatacgtaaca

SEQ ID NO: 4336 - DNA, 200 bp, Lawsonia intracellularis
atgtcccaagaatcaaaagtgcaatgacaccattagaaaaaataaaaattggtattgccatttgcccaacgacactttcaggattctctataaaaaaatgcaaagatgaaacagaaagagctgaaacaccaaatgaaaacgcccaaaaagatacagaaaaaggttgttcaaaagtccacaataatagccatagtaaaaag

SEQ ID NO: 4337 - DNA, 200 bp, Lawsonia intracellularis
atcagctgtaataaaccatatccaaacaaaatttgagaaaatatatctgtatgtcctccattcacaaaaagatatgcttcacaagcaactagtggtggagcaagttgaataccaattgatggtcggaggggattaggtaatgctcccattgtacgaaggcgttgcaagataacactctctaaactcaaccatgaaaatat

SEQ ID NO: 4338 - DNA, 200 bp, Lawsonia intracellularis
acctgcaccaaaaaacaatattccccactccttatatcctaatactcccaaacaaatagcactaattaaattaccagaaactgttggaaggtatacacctggtgttgttgcctcttaagaatgaagtccacgccagagaccagcactacgatatgcagcaaaacctaactgtcctatagtcccaacgactacaaaccaca

SEQ ID NO: 4339 - DNA, 200 bp, Lawsonia intracellularis
gcgctactgtatgaaaatacggatatatccctgcacctattaacatagttgtagctggaaataaactaatataacaacattggataggatcattcacttctgccaatgctgctggacgataccaaatccatttagtaatatatattatagctaatactaaccagacaacccctgcaagtaacattagacattctccccac

SEQ ID NO: 4340 - DNA, 200 bp, Lawsonia intracellularis
aaagtggatatctgccatatttttgcagctatacgccatgctgttcccatacctgaaataccaagaaccatacccaaatatgctgctggaataggaaatgtctttattggagaaaaaggttctagcataataacttcctttatctataaaaaattatacgttatagtaggataatgttatataactaatcctactacttt

SEQ ID NO: 4341 - DNA, 200 bp, Lawsonia intracellularis
aaagagaactttaaagctttttaaaattagttctatattaatgtataaaaaatatatcatatactagttctaattttagacatcttaactatatatatcatgtaacttaaataatatatattaaaaataataataaaaatacttatatgttaagaaataaaacttattattacatattatatttctctttttaaataata

SEQ ID NO: 4342 - DNA, 200 bp, Lawsonia intracellularis
taaaaatttataaataataatataatagttaaaatactctctatactttttcataagaatttattttataaaataatataataattttgttatctataacagtaaaattgtaataaattttaagaactataaataaattagctagcttttctaatatattaaggggaaatagtgagaaaacatctcttgtatattccttg

SEQ ID NO: 4343 - DNA, 200 bp, Lawsonia intracellularis
acaaaaatataagctgaagatagtaaaaagaaaaagtaaaactcctaataaagggttaatttagaaaattctcttaaggagaaaaaggtaatagtatttgtatattaaaaaatttttccttcttatctataaacatacaatattcttaggaaggttaaaataacaaaggaataccagtaaaatatacattattactaatt

SEQ ID NO: 4344 - DNA, 200 bp, Lawsonia intracellularis
aatttttataggacgaactattacagtaataagatactgctaatagttctttatagaggataacaatatttcctcctttgtcccttgataaaggagtttttttatccctatattttataaattttagtcatcctacaatgtttatattatattaaaatatccactatctattaagataatgtaatattttaatgtaataa

SEQ ID NO: 4345 - DNA, 200 bp, Lawsonia intracellularis
agttaggggatattatggaacatccagaggtggccttctcacttgcagctatgcaagttattcgtcgtaatggcgatattgtatccttcaaatctgaaaaaatagcagctgcattaacaaaagcatttattgcagttaaaggtgaacaaagtccattatcttctagccttcgtgatgtagttacacatctgactgaaact

SEQ ID NO: 4346 - DNA, 200 bp, Lawsonia intracellularis
gttattagtgcactcacacatcgctttccagatggaggctctatacatattgaagatatacaagatcaagtagaacgtgccctaatgcagtctggagaacacgatgtagcacgagcttatgttttgtatagagaaaaacgtgcagctatgcgtaatacatcagaaaaaaaagctgtattgcatctagtagataaaggcga

SEQ ID NO: 4347 - DNA, 200 bp, Lawsonia intracellularis
gaaaaaagttctagaccacacatggttaatgaatatatgccatgtagcttgcaaaaatctaaccagtgtttcttcaatctctatatttaataatacattaaaaagtttatatgatggtatgtctctagcagatgtatatagctctctaatcctctctgcacgcacaatgattgagtatgaaccagaatataataaagtaa

SEQ ID NO: 4348 - DNA, 200 bp, Lawsonia intracellularis
ccgcaagattgttacgccttagcttagcatatgaagttcttgatcaatccacagaattaatggatttacatcaacttaagatagcaacaatctcatatttccctaaattcattgagcttggaataaatgctggtttattagatcctcgcctttctacatttaactattcttatcttgctcaagcattagtcccggaacgt

SEQ ID NO: 4349 - DNA, 200 bp, Lawsonia intracellularis
gacgaactttttggatatataggaattcaaactctttatgatcgatattttctacatatcaaaaaacgtcgtatagaactcccacaactcttttttatgcgtgtagctatgggactagctttaaatgaaaaaaagaaagaagataaagcaatcgagttttataatttactatcaaactttgattttatgtcttcaacacc

SEQ ID NO: 4350 - DNA, 200 bp, Lawsonia intracellularis
aacactctttaatagcggaactatacgcccacagctttcctcatgttttcttacaactatcaatgatgacttagaaaatatctttcaatctataaaagaaaatgcattactacaaaaatatgctggtggaatcggaaatgattggacacctgtaagagctttaggcagtcctataaaaggaacaaatggccaaagccaag

SEQ ID NO: 4351 - DNA, 200 bp, Lawsonia intracellularis
gggttattcccttcatgaaggttgctaatgatacagccttagctgtaaatcaaggaggtaagcgtaaaggagctgtatgtgcttacttagaaacttggcatttagatatagaagattttcttgatttacgtaaaaatacaggagatgatcgacgacgtactcatgatatgaatactgctaattgggtaccagatctcttc

SEQ ID NO: 4352 - DNA, 200 bp, Lawsonia intracellularis
atgaaacgagtcctagaaaatagtgattggacgcttttttctcctaatgatgttccagaattacatgaaaagtttgggttggaatttgaaaaattttatactcattatgaagcaaaaacccttactggtgaaataacattatttaaaaaagtctctgcagtacaactatggcgtaagatgttaactatgttgtttgaaac

SEQ ID NO: 4353 - DNA, 200 bp, Lawsonia intracellularis
aggacatccatggattacattcaaggatgcctgtaatcttcgttcgccacagcaacatataggggttatccatagctctaatttgtgtacggagattaccctaaatacatctaaagaagaaattgctgtatgcaacctaggatcaattaacttatcatctcatttaattaatggagaagttgatcaaaacaaactatcac

SEQ ID NO: 4354 - DNA, 200 bp, Lawsonia intracellularis
aaacgatcgccactgctctacgaatgttagataatgttattgatataaattactacaattctcctaaagcctcctatgccaatcttcaacatcgccctattggtataggaattatgggatttgctgactgtctatataaactaggtataccttatgcttctcatcaagctgttgagtttgcagatcgatctatggaaata

SEQ ID NO: 4355 - DNA, 200 bp, Lawsonia intracellularis
gtttgttattacacatattgggcatctacagagttagcaaaagaacgtggtgcatatagcacattccctggaagtctatgggatcgtaaaattttacctcttgactctctggatcttctccttaaagaacgaggtggatttcttgaggttgatcggtcttcacggttagattgggatgctctaaaggatcgtatagctaa

SEQ ID NO: 4356 - DNA, 200 bp, Lawsonia intracellularis
atatggtatgagaaactccaactgtgtctctcttgcgccaacagctacaatttcaaacattataggtgtatcacaaggtattgaaccagcatatcaaaacctttatgttaaatcaaatatgtctggagaatttaccattgtaaacgaatacttagttaatgatctaaagaaacttaacctctgggatgaagcaatggtag

SEQ ID NO: 4357 - DNA, 200 bp, Lawsonia intracellularis
ctgatttaaaatattttgatggatctgtggcttatattgatcgagttccagactcactgaaaaaactctatgccactgcttttgaaattgatcctgtatggttaattgaagctgcatctcgaagacaaaaatggattgatcaagctcaatctctaaacttatacctagatactccttctgggaaaaaaatggatgaaata

SEQ ID NO: 4358 - DNA, 200 bp, Lawsonia intracellularis
tacaaacttgcttggttacgaggattaaaaacaacttactatttacgttcattaggagctagtcaagttgaaaaagtaggaacaaactcgcaatctgtattaaagaaagatacagtcttacgagcatgctctattgatgatcccgaatgtgaggcctgtcaatgagtacattaaaaaaaaccaactctttaaactgggat

SEQ ID NO: 4359 - DNA, 200 bp, Lawsonia intracellularis
actcataattctatagaaactaatactggtatctcacaccctcaagatggggtaaactctcttagaaaaatttcagaaagtttacaagatagtgttacactacctatgcctgttaatgcctctgacaaacgtatcgttaatgggaaaacggatattaaccaacttcttccatttagatatccatgggcttgggatttctt

SEQ ID NO: 4360 - DNA, 200 bp, Lawsonia intracellularis
tcttaaagctaaccaaaaccattggactccacttgaaattagtatgtcacaagacgtttatgactataatcatacacttacaacaaatgaacgtcatgtttttgacaatgtcttagcttatttaacgacatctgacattcttgctatgcgtaatattggattagctgttatggaaaaaatgactgctccagaattacaga

SEQ ID NO: 4361 - DNA, 200 bp, Lawsonia intracellularis
tataccaagcacgacaagtttatgaagaagctttacatacctggacataccaacattgtattgaaagtttagggctagaacaatcagaaatatataaccgctatagagtagttccagaaatttatgggaaaatacttctatccaataaaagattagaacaagttttacgttctgatataaatttatcagataaagataat

SEQ ID NO: 4362 - DNA, 200 bp, Lawsonia intracellularis
ttacatgaattcataatgtcttacatcttttttgcagctattttcgaaggatgctggttttataatggattttctcctattttctctttacagcgtagaggattaatgaaaggaactgctgaacaatttcaatatatcctacgagatgaagttttacactgtacatttggtataactgttataaaaggattaatagaaga

SEQ ID NO: 4363 - DNA, 200 bp, Lawsonia intracellularis
agaaaacataacacttgatcctacggctgtacgccagttatgggacgaagttgaagcagcagaaatagcttatgctaattatattttacatgaacctattattgggtataatgcagatttacatataggacaatttcgctttattgctaatcgtagatctcgacaattaggtatgaaagaaccattccctggagcaaaaa

SEQ ID NO: 4364 - DNA, 200 bp, Lawsonia intracellularis
atgtattaccatggttagatgagcagtcaaatcttagaaaagaaaaaaacttttttgaaacacgggttactgagtatcaaactggtggtggactaaaatgggattaatacattcaaatagacaaaaaaagattaaatagagattacgattattgttgtcagactaaataaagtattcttcattgaatctaatttatattc

SEQ ID NO: 4365 - DNA, 200 bp, Lawsonia intracellularis
tactcaaataacaacctcatagtattctattaagcgctagtagttagaagtaataaattttatcctcttaacttaaaaagtaagatcttttattttaaaaaatttttgcctaaaaaacaagatataagaagagctatactactaattagtagtatacaactctgatacactttaaaattactatcataataccattacag

SEQ ID NO: 4366 - DNA, 200 bp, Lawsonia intracellularis
agtaattacccttataagtgtaatcaacacatagcccccaaaatatataaaaatattacaaactataaacttaacaaaactttttacaacaattgtaacttttcttttacccaatggctcacttttttcatctcattagataagctatcataatcaaagcgtgtgaatgtaccattataatataaaatttcaccttcaac

SEQ ID NO: 4367 - DNA, 200 bp, Lawsonia intracellularis
catagtaagaaaaacttccattcctgtagtagcataaataagatgagaaattgggttaaacattggttgaagattaggcatactcatgtctaaagcaataagatctgcaggatgtccaggtgcaaggacacctaatttaggttgatgtatagctgcagcaccacctaatgtagccatatctagaacagtttgtgcaaaaa

SEQ ID NO: 4368 - DNA, 200 bp, Lawsonia intracellularis
gagctgttggattattccaatagactttgtgtagtagtgcgcaacgtcccatctccataaacatattaagacaattattactagcagccccatctgtaccaaggcctacagaaagattacgttttatcatttcagggatgggagatacacctgaagcaagcttcatattagaagaaggattgtgagaaatcacacatcca

SEQ ID NO: 4369 - DNA, 200 bp, Lawsonia intracellularis
tgttcagcaagacaagttaactcttcaagattaacatctacaacatgagctaatgtcgtacgtggagtgagtattcctaagtcacgacaataagaaacaggacgtaatccatatttttgcaaacatatttgtgtttctgtagttgtttctgaaagatggatatgtaaaggtaaactacactcttcagcaacttcaataca

SEQ ID NO: 4370 - DNA, 200 bp, Lawsonia intracellularis
ttgtgataatacttgaggcgttgttgtatagacagagtgaggatttactacaacatttatacgtgtattatcagaatagagttctgccattttcttagtatgctctaaagctgtctttgctgtatcacatgaaactgacggaaaaacaaaaatgctctctccacctgtacatcgaattcctgctttgattgcagcttcaa

SEQ ID NO: 4371 - DNA, 200 bp, Lawsonia intracellularis
aaacaacatcttcaaaaaagtacatatctaaacaagctgttgtgcctgtccgcaacatttcagcatatcctaataaactactccagcgtacagtttccggagttaaatgacgttctataggaaagatatatgattttaaccactccataagaggtaaatcatctgctaatccacgaaaaaatgtcatagcaacatgtgta

SEQ ID NO: 4372 - DNA, 200 bp, Lawsonia intracellularis
tgtgcattaattaaacctggcataacaagcatattacaaagatctaaggtttcttttgcatcccaaaaagaacaaatttcttcttttggacccaatgcaacaatatttccagaagtaatagctagtgaaccattgtaaagaataacacgttctttattttgagttacaatacaatgagcatgtattattgtatcacataa

SEQ ID NO: 4373 - DNA, 200 bp, Lawsonia intracellularis
ttgagccatttcatatccttaataagaaaaaactcacactgaatagcctattgtataaatgagtaagaaaggtattctattatctaataatatcttcttcatataactactcttgtcagttttaatttattaataactaaaaagtattttaatagatagataataagattatatcattcattagcctatatccattactt

SEQ ID NO: 4374 - DNA, 200 bp, Lawsonia intracellularis
ctttatatataaagaaatctattggctactctatcaaactatgtaaaataattaattaagtgattatatcctttacgttactatcatattatattaataactctttcaaagaaaaaataccttacccggtatggtaattttcctccagttaaccaatagtaactatatgtctactataatacaacttaatcccaactaaa

SEQ ID NO: 4375 - DNA, 200 bp, Lawsonia intracellularis
aatcttgtttggaataacagaatgaattttgttacacttgaattttgtatcttttttcctattgtactattcatactatacctctcttgttaccatcttggaatatataaaggagcacttcttgctggtaatatattcttctatgcttatgcaggattaacctttttacctcttctttttactgttattattcttaactg

SEQ ID NO: 4376 - DNA, 200 bp, Lawsonia intracellularis
gtgtactggcaaatttcttttttcttctaaaacaacttgttccaaaaaaattatcattactatcaatataattctccacattctcatacttgcttttttcaagtattatgaatttattatcctgtctcttgagtcaatcttttcactgggaagatcaatacctattaccttacctatgatagatattttctttcctgtag

SEQ ID NO: 4377 - DNA, 200 bp, Lawsonia intracellularis
gattatcattttatacatttcaaggtctttcttactctatcgatcaataccgtaatccaacgtcccacccagaatcttttattaatgtgagtctttttatatcttttttccctacaatattagctggtcctattatgagagggcatcaatttttcccccagctaggaaagtgtaactatatatcagatgaacttataaca

SEQ ID NO: 4378 - DNA, 200 bp, Lawsonia intracellularis
ggctttgctttaattcttagcggtctttttaaaaaagtagttcttgcaagctatctgtcagagcacattgtccgtgatgtatttcaatcaccaggcatctattcttcatggacaattcttacagctgtctatggttactccatccaaattttttgtgacttttcaggatattcagatttagctattggaattggagcact

SEQ ID NO: 4379 - DNA, 200 bp, Lawsonia intracellularis
tatgggttatcgtattcctcaaaattttaatgcaccatacctagcgtacaatttacaaattttttggcatcgttggcatataacactctcacagtggctaaaagactatctttatatcccactaggtggaaataaaaaaggaaatcgttacattaaccttatcatcacaatgtttattggcggtctttggcatggttccc

SEQ ID NO: 4380 - DNA, 200 bp, Lawsonia intracellularis
atcttcgttttcttatttggggatttttacatggcattggacttgctttagtccattttataaaaactgtatgtgcttcacagacaaatgttcaatacctacttaacattccctttataaaaacaatacactatattattagttgggctcttacattccattttgtgtcttttctttggatattttttcgagctgaagat

SEQ ID NO: 4381 - DNA, 200 bp, Lawsonia intracellularis
gtcccttgtgctttggaaattataaaacgtattattatttttggacaagaaggagagggttttccaattcttgttattcctgtcattttaacaggcttattaatacaggttgttggtccttatattttaactagctttactaaattccaaaaacgactgcattggattatccagacttttgttcttgctttcattgcagg

SEQ ID NO: 4382 - DNA, 200 bp, Lawsonia intracellularis
tattattcttaaaatgggacctgatggcattatgccttttatttacttccaattctaataaatagtatgaacaacatggttaaacaaaaaaagattacatcaacacaattaacaccatcacgtagtattattatctacattgttactctatttattctgttattgttagatacaggacgagtaattccaatactaaaccg

SEQ ID NO: 4383 - DNA, 200 bp, Lawsonia intracellularis
tcttagcagtgacttcccttcaataagtattgctgctcaatttattcaaaaaacagctgagatatcaaaactaacagaactttcagcatttgaatcaacgattataaaacaagtttctttaaatacagtcataggagaaatccctgttcataactcatatcctcaacaagagaaaggagaagaggatacttctcactcac

SEQ ID NO: 4384 - DNA, 200 bp, Lawsonia intracellularis
accctgaaaagtttgaagaagcatgtaagatgcaacaagatgctgtaatggatcatacagaacctcatctaacaaatgaactttctccaccattaacttctactccaaacttagaaggcaataagtcagaaacattatctacatcacctataaatactatagatcagtctatccctactaataataacaatacaatactt

SEQ ID NO: 4385 - DNA, 200 bp, Lawsonia intracellularis
atcataggcgactctatgataaatgaaggacttggaccagttctacaaaaaacgttacataatcagtacccatttaaagttatccgtgaaggaaaatattcaactggactttcacgaccagattattttaattggccagaacgtctgacttttttagtaaacaaacatcaccctaaactcattattctctgtttaggtgc

SEQ ID NO: 4386 - DNA, 200 bp, Lawsonia intracellularis
aaacgatgctcaagatatttttgatgataaaaatcatagataccatcctggcagtcaagaatggaaaaaaatttataccaatagagcaaaacatcttttaaacatagcaacatcacaaggagcttatgtaatttgggctggattaccaattatgggtaaagtaccatatgcaacacgcatacagtatgtaagtgaatgtc

SEQ ID NO: 4387 - DNA, 200 bp, Lawsonia intracellularis
aaaaaaaagcttgtgatgagacagtaaatacacaatttatagatacacagtctgttttagctactcctcagggcaagtatactacatacacgcaagagtcaaacaaacatattcgactaagagctaaagacaaaattcatgtaacagaagcaggaggtagacttcttatgaatcacctcatgccatatataaaacaatct

SEQ ID NO: 4388 - DNA, 200 bp, Lawsonia intracellularis
ttggagactataacagtaaataatacaaaagataataaacaagatctttatacctcaaatgcagagaacgatatagttatttatattccttcatcaattcagcaagcatctataccatgctcagtatttattcctcaaaacaaaagtcaagaaaaataccctgtattactgctattacatggtgtaggatgtacaaatga

SEQ ID NO: 4389 - DNA, 200 bp, Lawsonia intracellularis
aatttggaaacaaatgactggagatctcctgcaacaacttgcaacttttcatagtattgtcattattgcaccagatggaggtaaaaatagttggtatgtagatagccctcttattcaaacaagtcaaattgagtcatttattataaatgaacttaaaccaacaatgcttgaacagctacctattatagataaatggagta

SEQ ID NO: 4390 - DNA, 200 bp, Lawsonia intracellularis
tagcaggaatctctatgggtggtcatggtgctattactcttgggctacgtcaccctatgttatatacttcaatgagtgctattaatggtgtccttaaccttatggtacatcctcatgaatgggggataaaaaatgttctaggtgaactatctgattctcaacaactatgggaatcatattcagcatatcatcttattgat

SEQ ID NO: 4391 - DNA, 200 bp, Lawsonia intracellularis
aatatctcaaaagaagatgtcccaccaatgctaattagcattaatctaactgaccctgcattagatgaaaatcgatgttttttccataaagctactaaattaaatcttcctatacaatatagtgaaacatctagtgatcaatattgggattactgtctttatcaactccctattcatataggttttcatgcaaagaaatt

SEQ ID NO: 4392 - DNA, 200 bp, Lawsonia intracellularis
acatcatcataatgaattatcgcaaaataatgattaggatatcaaataataactaattacccctaacaatactaactacttgttctatattaacacacccatgattaaagataaaaagctagtcattgttattccttcagagtttcctggtggactagctgcacgattaagtccacattttgcttactgtgaaacatata

SEQ ID NO: 4393 - DNA, 200 bp, Lawsonia intracellularis
cactcactactattaagaataatgtagttttacatgtcacaactagacctaatatcattcaagaaagtaatgtaaaaagagcaatacaaaatattgctgagctacagactaatatacttattgttcgaggcataggtcttcacccacttgctatactacaacaaaaaggtattaaaatttattactctaaaaacttaccc

SEQ ID NO: 4394 - DNA, 200 bp, Lawsonia intracellularis
acagtttctactgttctttcatcctttctacaaggaatgcttataccctacaatcaaagccctcatacctcttcataaccttaaaacaactagtactaatgattcaccataaaaattttctctattaaccaataaaaaaatatccactacttcttcttatatttttgtatagtctaatataccaaaaatgtaatagcttt

SEQ ID NO: 4395 - DNA, 200 bp, Lawsonia intracellularis
ccatataatggacattatggtaagattacaaataatgccctattcatttatagtttaatcaagttggactagttatatgtatattattattggatactttattgttattgcttccattattggaggctaccttatggctaaagggaatcttgctttactctttcaacctgcagaacttgttatcattattggggcagcat

SEQ ID NO: 4396 - DNA, 200 bp, Lawsonia intracellularis
taggtgctttttttgcttcacagacgaaatattcatttactctggtcattaaaaatttatcacacatttttggcgatccaaacagtacaaaaataaaataccttgaaacacttgcccttctctatggacttttcttaaaaatgaatagagaaggtgtcattagtatagaaagtgatatagaaaaacctgaatcaagtcct

SEQ ID NO: 4397 - DNA, 200 bp, Lawsonia intracellularis
atctttagtaaataccctacaattgtaaaagatactaaagttgttgcctttattgcagatacattacgagtttatctgacaacaggtgcaccagaagatatagataacctcatggaatctgacatgaaaattacacacgaagaagaattattacctgcacattccatcagccatatggcagagtcgctaccaggaatggg

SEQ ID NO: 4398 - DNA, 200 bp, Lawsonia intracellularis
tattgttgctgcagtattaggtgttgttattaccatgggaaaaattaatgagcctccagaagtccttgggcattatattggagcagctttggttggtacatttataggtattcttttctgttatggtttttttggacctatgggttcaaagcttgaaacctctgcagaagaagcacatttttattataattccattaaag

SEQ ID NO: 4399 - DNA, 200 bp, Lawsonia intracellularis
aagctgttgcagctgctatccgaggttctacaccaatgatagcagtagaatatggaagacgtgccatacctaatacatttcgtccatcattttcggaaatggaagaacgtctaaaaacaggataacctctctctaataaacattagttacatcattaaaggaaatatatatgtctggctcatggaaagtggcttatgcag

SEQ ID NO: 4400 - DNA, 200 bp, Lawsonia intracellularis
actttgttacagctatgatggctttctttctactgatgtggattcttgcaatgacaccccctgaggttaaagaaggtcttgctgcatatttttcttcatctgatgctacatttaaaacacctgatagttcgccaatctctaacaatcctcttatcaaccaaatagataaacttgatactcgacaattaaaaattaatgaa

SEQ ID NO: 4401 - DNA, 200 bp, Lawsonia intracellularis
acagaacaatctcattatgctcttgctaataaattaaaaaaaatgttaatggctgatgctatcccacagtcagcaacaggaataagtgctgacgatgttggtgtattattacgtgtaaattctaattccacgtttcttcctggtacagcaactcttacacccgaagggaaaaaagttatgggaactgtcttagccgttct

SEQ ID NO: 4402 - DNA, 200 bp, Lawsonia intracellularis
ccgtgaatataatctttaccttgtgatacgtggccatgctgatattggtgaaataacaaaaggcagcccttttgcttctaactgggaactttcaggagctcgtgcagctgcagctgcacagtatcttgtagagcacgggataaaggcttcacgaattcgctctgtaggatatgcagatacaagacctctagaacctagtt

SEQ ID NO: 4403 - DNA, 200 bp, Lawsonia intracellularis
ctcctgaaggaagtacaaaaaatcgtcgtatagaattctattttcatcggccagaagttatgtcttatggcgttgtatattaatagcattcttaaaagggaaaaaattcctaacgtgaagactggattgaaataaatgtgtcatgaagactaactaaccttccataattttttcgtatttcatatcctgcaggtgtcaat

SEQ ID NO: 4404 - DNA, 200 bp, Lawsonia intracellularis
tctttttttggattctcaatataagtacgtcttaagtatctatcatctaatattgtttctatatggtgaataacagtagctgtaatttgatcaaaatatgttacaagctcaaactttaattctcttaaaatttttacagcttctaacaacattttattataactaattctcactcctttaacatttcgtgacataatatc

SEQ ID NO: 4405 - DNA, 200 bp, Lawsonia intracellularis
ttctagatgtttgaccatacgtgcttggcgaatatacgcatatttattcattacctcatggtaaaggtcaccatattcttcaaataaatctttatggtttggtgcatgaagataaccttctaaaatttttaccattgaagtaaagaattcatcactatagctaacaagtcgtcgttgattttttgaaagccatgcaaata

SEQ ID NO: 4406 - DNA, 200 bp, Lawsonia intracellularis
aaaatttaagtcgtttttcttctgtttctgtgttttctatcaactcattacgtttataaactatacgtccaacatattcaccacggacaatatcatttaagtgcaaaataattgtgctagtatcttttataatattaacatcttctaatatttcacctgttaaaggatgaataatttcttgactctcaacagaaagtgca

SEQ ID NO: 4407 - DNA, 200 bp, Lawsonia intracellularis
cgctcttgcctaacattatcatgattatagcgatgttgtttatatttgatacgaataatggcaatataattctttggatcaacaaaataacttccctttgaaagacgttctataacttctttctgaccaggctcaacacgaataagcgcaaccttttcaactctggggtataatctgttacctccattattccatattgt

SEQ ID NO: 4408 - DNA, 200 bp, Lawsonia intracellularis
tgttattactctatcagattgacctaacactctaaccataaaatgttcacccattttatgaagacggcgagagaataaagcagctgatgttctacgctcagaagcaacaggaaagccataaagttccatcaaaaactgatatacaaatagtctgttttgctcataaaggctgttattaccaagctgaaacttacgaattt

SEQ ID NO: 4409 - DNA, 200 bp, Lawsonia intracellularis
taaggccatatcgttttatttcaccatctatatctgaagggaatgacccaaatattccagcaagataatagtatcctagtggatctgtagcaaatacatgagctcgatccatatgacataagtatggaaggattgctggataataatccaaagaagatatgtctacatgttgaaagcgttgtttaaaagcatcttgattg

SEQ ID NO: 4410 - DNA, 200 bp, Lawsonia intracellularis
tttttaggtaaccgagttaaaaatgtctgtatattatgagcaatacactttaactctgcttctttttcctcttttccagggatagaatttaatggatcacatgaatgtaaaatatcatattggaaaatttcattaaaactttcaagaggacgggcaaaggctaccatcgaaaatcctggtaactctttatattctaaaag

SEQ ID NO: 4411 - DNA, 200 bp, Lawsonia intracellularis
ttctgcttcaaaagaaggtaataattctctatgttcaattaaaggatattgtggctgtgtgctccactcttttaacaggcaaaattttatttgtacaaaatcaaggtaatgcttaaatgtctcaagattatcaatatcaatcttgcaagaaaaacaatcaacatctttccatggaaacgctccctggctaaatgcttttt

SEQ ID NO: 4412 - DNA, 200 bp, Lawsonia intracellularis
cccacaaaaacgacattattatctctccaacttatctatatctttaacttatcttatatataataaatatcctttttcttcaactagctagtagtataataaatgtattcttatcttgtataaaaaatgtattcactaaatatactataaaaaatgagtacaacgtattatcaacagactatgtttattgatttatataa

SEQ ID NO: 4413 - DNA, 200 bp, Lawsonia intracellularis
aagtacataattactcttttaagaatgatcagcataacactaaaaagaaaaaagaaatttttaacgagaactaactgttatgtattcctaccagtaggctattatatcaaatagtattaaacttctttcttacaataaagagtacaatagatattataaggatagaaaatagtacccctaagatgtaaggtccatgccat

SEQ ID NO: 4414 - DNA, 200 bp, Lawsonia intracellularis
ccccaaagtgtccaagctaacccaaagattaaaggtgatacactttgactaaatctgaatatgcttccatttacagccataactgcagctctattatttgtaggcgctaaaatagcaatgcgttcagcaacaattggtaaagtaataccctgagcaagaccttcaaaaattaaagggacgatcatccacttcatacttgg

SEQ ID NO: 4415 - DNA, 200 bp, Lawsonia intracellularis
cattataataaatgaaaattgagccaaaaaatacccaaaacctgccataagtagtaatatattaaactgaacatgattattcaaccatcctaaactaaaagcactcattccaatacctatagcaagtataataaaaatatttcctatttctgcaggtgatacataaaaacgtatatgtgccatcatagggaaatatgtat

SEQ ID NO: 4416 - DNA, 200 bp, Lawsonia intracellularis
tcacagggccgtaataaatacaataagataaaaaagttaaactaaataatattaatgctttctggttagtgataatctcctttgtatctataaaatactttttccacttaactgagctacttcctttaactaggggaaggtaaaaactaagccaagcaacaggaaaagcaaggatacttacccaaaacggagcatgccaa

SEQ ID NO: 4417 - DNA, 200 bp, Lawsonia intracellularis
acaatttcgcctaaaagcccacctacagtagggaaaatagcaataccaatacttgctacagctgaaatttggcccataatttttggaagatcttctttatgatacatatcagctggcaaggtagcatataatactccaataacgccccctcccatgccctgaataacacgaaatataattagcatagtaaaattaagaga

SEQ ID NO: 4418 - DNA, 200 bp, Lawsonia intracellularis
aaaggcacataataacccacctattccaaaaagaaggacaccagggactaaaacagctttccttccaagtctatctgctaaaactcctgcaataagagccataatgataccaggagatgtataagcaactgtaacccaactaacttgctctgtagttaacataaaacgttgagcaatagcaggcaatacaggtaaaggaa

SEQ ID NO: 4419 - DNA, 200 bp, Lawsonia intracellularis
tagtcactcccataacaactaataaagatatactaaaaaaaagcactttatattttatcaaaactattatctcctatagtatattactatgatatttatatattatataaaataatataacagatagtactgtataatatatatgttattttaacaataaatattataaaaataaaaaataatacgatattactaacata

SEQ ID NO: 4420 - DNA, 200 bp, Lawsonia intracellularis
ttgatataagtaaaaaatatttattattatcataattctatacttaattataaataagtataatatatcttgagttaatactaattaatatattactattatataatagtatatcctctgtatattatagcataaagttagttaacagtttatacatatagttataaattgttttgcagaagtattatttctatatgggg

SEQ ID NO: 4421 - DNA, 200 bp, Lawsonia intracellularis
tcctcaaatggatatagctacgttactagggattgtatttggttttacccttgtgctggttgctatttttataggtcctgtaccaggaaaatttattcatgttcctagtatgattattgtttttggtggagtaagcgcatcaattttaatatcttttccgtttgaagatgttcgtcaagccatttctgcaggagtcaaag

SEQ ID NO: 4422 - DNA, 200 bp, Lawsonia intracellularis
ctttctcttcaaaaaaaacaaaagcttctgacgtagtaacaacaatggtcaaaattgccgaaattagtcgtagggaaggaacacttgctcttgaacgtattcaaacagataatccacttttaaaaaaagcaacacaactcattgcagataatgcagacccctctctaatccatgacacagtagctatagaaattgcatca

SEQ ID NO: 4423 - DNA, 200 bp, Lawsonia intracellularis
ttaaaacgaagacataaagttggcattaatgtattccaaaaattaggctatcttgggctagcatttggaatgataggaacacttattgggcttgtacaaatgttagcaacaatgaatgatccttcagaattaggagaaggtatggctgtagctatattaactacattttatggatctattatagcaaatcttgtttttat

SEQ ID NO: 4424 - DNA, 200 bp, Lawsonia intracellularis
ccctattgctgacaaacttaaagcaaaatctctacaagaagaacttattctatttattatttttgaaggtgctaaatctattttagagaataataatcctaaacttgtttatgaaaaactttcatcttttttaccaccaaaggagagaattcgtgcttgatacctcattactttcagatgacgatgatgataaaaatgat

SEQ ID NO: 4425 - DNA, 200 bp, Lawsonia intracellularis
ggttggcttacagtcttctgtgatatttctctgctccttctcacattttttattttaattctctctatgtctagccttgataaagaaaaatttgatagctcctttagtgcaattagagatacctttggtggagatcaacaaaaaaacattacaactaaacaaactataaaagagtcagaagtagcagacttcttaaaact

SEQ ID NO: 4426 - DNA, 200 bp, Lawsonia intracellularis
tcgtgaagaaatgattgctgctcaaaaaaatacatttgatgctattagaagcttcattacagagcatgccctaggagataacataaaggctactttcgacaatgggatcattacattaaggttgcctgatgaagttctatttgcacctggctcagagcaacttacacctcaaggagaaaaggctttatcgcagcttcgtg

SEQ ID NO: 4427 - DNA, 200 bp, Lawsonia intracellularis
atctatttcttaagaatcgtgagcaatctattaatattaaaggatatacagataattcgtctgtatctgaaggtgcacgctttcacaataactgggaattatcagcgcttagggcggttaatgtccttaggaagcttctccaaggggggattgaagcaacacggatgaccgctacaggtcttggtgaccttgatcctctt

SEQ ID NO: 4428 - DNA, 200 bp, Lawsonia intracellularis
gcaccaaatgatactcctgaaaatagagcacaaaatagacgtgtagaatttacccttgaaagaaaagtaaccaatcctttacaataaatatttatcgacttttctagttaaggataatttcactatacataataaataattataaattaaaaactaacttctaatttattagctaactatatcaacttgcgtcctaatcc

SEQ ID NO: 4429 - DNA, 200 bp, Lawsonia intracellularis
ttttttaactattatattagtttgatgttttttcttatagttctcaaattagctgtctataaaatttattgatagatgaccccttttcatccttataaagatagtctaaaaggtgctatataatctaactacttttctgaagtaacttaataactccttttatacactaccactatgcaaatgataactataggaacacg

SEQ ID NO: 4430 - DNA, 200 bp, Lawsonia intracellularis
ttatataaacgttacaccacatagccacattacataaaagacaaggaacacgatggaggtctctgtctgtgaaaaaaataagacataaagtcctaattgctaaccgaggcgagatagcagtacgtattgctcaagcatgtcgtaaactaggacttgattttgtttgtgtctatacagctgaagatttagcatctggtcat

SEQ ID NO: 4431 - DNA, 200 bp, Lawsonia intracellularis
gtattgatggctaaagagtttggtacttctcaatcattatacaaaattgcttcttatcatgatgcaaacgaaattttatcaatagcagatgagtcaggagcaacggctattcacccaggatatggtttttttgctgaagattttcgttttgcccgccgagttacaactcgtactcgaaatcttattttcataggaccatc

SEQ ID NO: 4432 - DNA, 200 bp, Lawsonia intracellularis
atggagagtcatccgtgaacttggagacaaaattaatacaaaacgtcttgcaagaagtttaaaagttccaactgttccaggctcagacaaaccaatttatgatgaaatggaagcagaaaaaatcgcaaggattttatatagcttccaagtacaacaaggcattcaacgacccttagtccttgtaaaggcctctgcaggcg

SEQ ID NO: 4433 - DNA, 200 bp, Lawsonia intracellularis
gaggtgggatgggtattgaagaagtctatgatatagaccaatttcgtgcggtatatcgtcgtatccgtaattatgcactacgacagtttaaagatgaaggtgtcttaattgaacaacgaatttgtaattttagtcatcttgaagtgcaaattattgccgatcaatctggcaaaaaacctgtacactttggaacaagaaat

SEQ ID NO: 4434 - DNA, 200 bp, Lawsonia intracellularis
tgtacaattcaatctactggattacaaaaacgtatagaagtagctccaggattttatccacaaacaataaaatacaactttaatgctgcaaaagttcttgaagacattacaaactattctcttaccatggcacaaaaagtaggctataataatgttggaacttgggaatggattgtaacacacaaagggaatccatttct

SEQ ID NO: 4435 - DNA, 200 bp, Lawsonia intracellularis
aatggaagtcaatacacgtatccaagtcgaaaatggtgtttcagcacgtattgctagaattcatgggaaagacggtgttgaccttatcgcagagcaaattcgtatagctcttggcgaacctttaggatatactcaaaatgatatatcatttgaaggagttggaattgaatatcgacttattgctgaagatcctgactgta

SEQ ID NO: 4436 - DNA, 200 bp, Lawsonia intracellularis
aatttacaccatgggtaggttgtattgatactttttcatggaaagatcaaccatggcttaccatgcatactcatgttcctacaaacaaaccttatgaaattcctgtagaatttgatcctaaccttgctttagctattatttggggaaaagatcttgctgaagcccaacaacgtggcctgaaatttcttaaccaactatca

SEQ ID NO: 4437 - DNA, 200 bp, Lawsonia intracellularis
ttaaaagggaaaaatcaacagggagagacattaaagtcaaacatacaattccttaaatcaaatacagaacgtatcctccaattttaattgagtacatctatggatatagaaaaacaaatatatcatcttactgaacgccttaattatctaaaagatatttttgcagggaagcacgctaaagttattgaattattacaagg

SEQ ID NO: 4438 - DNA, 200 bp, Lawsonia intracellularis
ccggctagcaacttttaccaatcgtaccaatggagaaactcaacaagacccaagtgcagaaattggaacccttgaagagctattcacttttatggaacataagcttgaaacaaagcttacccctatggataaagtgcgtattgttcgtcatcctcaacgaatttgccttcatgatattttagaaaatgtatatgataact

SEQ ID NO: 4439 - DNA, 200 bp, Lawsonia intracellularis
tcacagaaatagctggtcaacaagaacatagtattgatccaagtatgttgattgcacgtgctactatcactcgtcgtaggggaaaaaagacatataaccaatttattatggtcataggtcaagaaaaagggcatggagaagagtttcgtaatggtggatcagtaaaaccatggggtaactctaaggctttacattatatg

SEQ ID NO: 4440 - DNA, 200 bp, Lawsonia intracellularis
aaagttgcagaaactgaaggtatcccaatccatacatatgttttcactccaggctcataccccattgaagataccccaggtgcagcacaacaaattgcaaaaaacctttatgaaatggcagatctttctgtccctattatttctattatctctgaaggaggatctggaggagcagaagcaattgcacttgctgataaacg

SEQ ID NO: 4441 - DNA, 200 bp, Lawsonia intracellularis
acttatgctttcacatggatattattctgttatttctcctgaaggagctgcagctattgaaggcaaattaaaaccaggtgaacgtgctacaccagaacttattgaattttgtgctaatcaacttcatatgacagcaaaagataatttatcgtttggctttattgatggagtgatacaagagccagatttaggagcacgac

SEQ ID NO: 4442 - DNA, 200 bp, Lawsonia intracellularis
ctcatcattatgacttttttcgaaaactccgccaagaagtcattcgtgctacagatgaagtagtccttggtgtaagaggccttgggttattccgtagaatagctcttaataggctgggaaaagaggacattaatatagatgaaatgtatgtaggttggaatttaaatctcaaatcttgtgctcgccttgtttctaaacgt

SEQ ID NO: 4443 - DNA, 200 bp, Lawsonia intracellularis
caaaagaaatttataactttatcaaaaaactcatgccttgatcaacgtccattttttaataaatttcataacttattaaatgactctataggaacacttgtctcaaaaacacgttacttcttctatacaaaatgccaacgtaaaattagatttgtctttgatgaaattacttctgaactccacttagttaaaagtcgttt

SEQ ID NO: 4444 - DNA, 200 bp, Lawsonia intracellularis
aacagccccactttgtagaataaggcctcccaaacgtcaaatagaagaagctgtagttcaccagctaacaactctctctgattgggatgatacagaatctcgaaagggtagatggtcatatattagtccacgagctacagaagatcgttctatctcttgccctaatgcagcaacacatggatgttttgatctttgggctc

SEQ ID NO: 4445 - DNA, 200 bp, Lawsonia intracellularis
cagatctctttggtgaatttgcaggagtatgtacatcatgcggtcatcactttcctatggaatatcaatgggttgctaaaaatatttttgatgaaaattctatacgagaattcaatacagaaatagaagctatcaacccgttaaaatttacaaaatttgatgaaaaactaatagaagcccgtaaaaaaacaaaactaaaa

SEQ ID NO: 4446 - DNA, 200 bp, Lawsonia intracellularis
agcggctgtattacctttgaagctactattcatggaataaaaacaattgttgctatttttgttggcagtttcagaggaggttctgttggagctgcagaaggaacaaaatttgttaaagcaataaaccgtgcaacaaaaaaacgttatccttttttagcctatgtacatggaactgcagggattcgtattcaagaaggaac

SEQ ID NO: 4447 - DNA, 200 bp, Lawsonia intracellularis
acatggtcttgcacaaatgcctcgttgtacagtagcagtccgtcgctatatcaatgctggaggactttacatagttttatatgatacaaactcttacgcaggacctgttgcaagttttcttggttgttccccatatcaatatgctattcgatcctcaaatattggatttgcagggagaggtgtcatcaaagaaaccacag

SEQ ID NO: 4448 - DNA, 200 bp, Lawsonia intracellularis
gcatggatattcctccagactatcacaatgcttataaagcattagctcgtggacatatccaaggtgtatgggatcgacgtgaagcacaagcgaatcttaaacaactattacttactgttggtggacgtaatctttattatagataacataattatagataacatattataatcatataggtaacaacccttttatgttgg

SEQ ID NO: 4449 - DNA, 200 bp, Lawsonia intracellularis
acatcacaaccttacttgaacatattaaaaaatctccatatgaagaagtcactatctcttcccctcatacagggatagtgacatttaatactcttaatattggtgataaagtaaatggtccttctggaacttggaaagaaaaatcaggtacccttttagctacacttacaagggaaagaaactctaaacctatttacagt

SEQ ID NO: 4450 - DNA, 200 bp, Lawsonia intracellularis
caacaaaaaggatatgttgctacaattcataaagaacttgaaggaacatttgtacaagcaaaaacaccacttttagttatccgacactttctgtcaaaagatgaagtacttcaattgattcttcagaaagctcttcatattttttcagcaccagaacgtgcaaaatattactttacccaacaagttgatgcaaaaattag

SEQ ID NO: 4451 - DNA, 200 bp, Lawsonia intracellularis
aacagctggttgcaaatccgttatggtatacgatggaatggagctttttattgtttcacgaatgaaaagagaaaccccactccattactctggaccagaaggaatcatctatgctacatactttcaacataatgaaaatgtaaacgtaggaagccctcttattggtatttgtccacaaaatcaacttcaacaaattgaag

SEQ ID NO: 4452 - DNA, 200 bp, Lawsonia intracellularis
atgttattctgaaagtacaaacggaatggcaagaacaagagtaatggtatgggtaaaattcttcaaatacgtgtttcggcttggacttatagggaagaagatgttgccataacatggcctaaccttacagaacttacatggcccactccaccataccatggagaaaaaagaggggttttagaacttgttgactcattaga

SEQ ID NO: 4453 - DNA, 200 bp, Lawsonia intracellularis
aaatcaactttcttttggagattggcctacaacaatcaaaaatactcttcatcaagggattcagaatcttgtccaaactaaaaaaaagttagaattagcactagcagactggaaacctaaagaagcaaatgatctaagtaatatattagaagatcaattaacagaacttaatcaaaaagttttacttccttaacaaaaac

SEQ ID NO: 4454 - DNA, 200 bp, Lawsonia intracellularis
ataccatatatatatataggacaataaacaatgttaaataaagttatgattattggaagacttggaagagatccagaaattcggtatactcaaacaggaagccctgtatgtagtcttaatattgcaacagatgaatcttatactgatcgagatggaaataaagttgaacggacagaatggcatagagtttctgtatttca

SEQ ID NO: 4455 - DNA, 200 bp, Lawsonia intracellularis
acgtgcagctgaaaattgtggtcaatatctgagtaaaggaagcttagtttttgttgaaggtaatcttcaaacaagaaagtggcaagaccaacaagggcaagatcgctatacaacagagataaaagctcaacgtgttcaatttttagatagaaaaggagcagacttaggacaaggactatatcaacaagaacaacctgtaa

SEQ ID NO: 4456 - DNA, 200 bp, Lawsonia intracellularis
gtagtactaatacacaacaaaatggatttgaagatataagcccattcccttctgaagctagtggtatggatgatgtacctttttaatcttaccttcacattctctacaaatctataattacgctgtattagttagtaaaataagtatccttaagctaaaaaagataaagctctattctaactagttttaattctttacta

SEQ ID NO: 4457 - DNA, 200 bp, Lawsonia intracellularis
attttaagtatcttttttttcaatttttgcccatgaatcttttagtgtcacagtcctattaaaaacaagtctatctccttgtgtatctggatctacacaaaaatatccaacccgctcaaattgaaccttttctcctggcttactaccctttaatgaaggctcaacaaaacctgttactatttgtttagaatcaggattta

SEQ ID NO: 4458 - DNA, 200 bp, Lawsonia intracellularis
taagttcactaatgtgagttccttctgaagctgtagaaggatcagcaagtgtaaacagatgttcataaagcctaacttcaactggtatagaatgagaagcagaaacccaatgaatctttccttttacttttttcttatcagttttttcaacttcttttgagtttggatcatatgtacaacgaagttcaattactttacct

SEQ ID NO: 4459 - DNA, 200 bp, Lawsonia intracellularis
tcactatctttgataacttctgtacatgtaatataataagtatatcttaaacgtacttctcctccaggataaagtctataaaacttactaggaggatcctcacgaaagtcatcttgttcaatatacaattctcgtgtaaagggtactttcctactaccaggaattgtattatctgaactatatggcatatctatccactc

SEQ ID NO: 4460 - DNA, 200 bp, Lawsonia intracellularis
tattttgtcatcaggataattttcaataacaaccttcaatggatttaacacacccattacacggggagatgttgcatttaaatgctctcgaacacaaaattctaataagctatactcaacaagattttcagacctggcaacaccaatacggctacaaaaattttgtatagattctggagtataaccccttcgacgtaaac

SEQ ID NO: 4461 - DNA, 200 bp, Lawsonia intracellularis
cagaaattgtaggcattcttggatcatcccacccatcaacatgtccttcatggacaagctgaataagtttacgtttagatagcacattatatgttaatcctaacctagcaaactctatttgttgaggatgatacatatttagtgtggtaaggatccaatcatacaactctctgttattctcaaactctaatgtacagata

SEQ ID NO: 4462 - DNA, 200 bp, Lawsonia intracellularis
gaatgtgtaatgttttcaagtgaatctgaaatacaatgtgtaaaatcatacataggatatatacaccaatcattacctgtacgatggtgttcagcatgcctaatacggtataatgtaggatctctcataacaatattaggtgaagacatatcaatttttgctctcaaaacatgtaaaccatcaggaaactctccggcacg

SEQ ID NO: 4463 - DNA, 200 bp, Lawsonia intracellularis
cattcgacggaataaatcaagattttcctcaacactccgattacgataaggactttcaatacctggagtcgtaagtgttccacgagtttctcgaatttcatcagcggactgactatctacatatgctttacctaaagaaatgagctgctctgctaagctatataatgtttcaaaataatcagaagcataaaactctctat

SEQ ID NO: 4464 - DNA, 200 bp, Lawsonia intracellularis
tttgccaatcaccaccaagccattttacgtcctcacgaatagaatctacatactctacctcttcttttataggatttgtatcatcaaaacgtaaattacattgcccagaaaactccttagcaataccaaaattaagacagatagatttagcatgaccaatgtgaagataaccattaggttcaggaggaaatcgtgtgtgg

SEQ ID NO: 4465 - DNA, 200 bp, Lawsonia intracellularis
acacgcttatcaaaacgtcctgattctatatcttgaataatacgagcacgtaaaaaatctttccctattataacgttatgggaaatatcttctttcttcatgtattctcccaaaaattattctatctatattaagtattctatttagttactggtggttgaactaaaggcttcatatgagactttgtacttgtagtctta

SEQ ID NO: 4466 - DNA, 200 bp, Lawsonia intracellularis
ggttgttcagaatctgttaactcctcaggagatctttgatgcatcttcacattatccatttccttttttccttcttcactttgcacattttgttcatgtgatttttggaaacgttcccattcttcacgagaaattttaccatctttatttgtgtcaattgcatcaaaagcaacttttttaagatttggaaatactgtttg

SEQ ID NO: 4467 - DNA, 200 bp, Lawsonia intracellularis
aaattcttcccaagaaatgtagccatctttatttagatcaatgtcatcaaaacggcttcctgccattacaggagacacaaaccataccaaaaaacatattaccatccatttcttcatactactcaccttatcctctatgtaatgctatagaatatagctaattctattaatataggtaactagctatgtagctatataac

SEQ ID NO: 4468 - DNA, 200 bp, Lawsonia intracellularis
aatatataattaaaataatagataactcatataagatagcttattaatagtaagtcccaaaaataaaaatcatgatatattgagatgaaaaatctacaacgtactttatttttctttacagtcactttatatgtcatttgtagtcttcttattgttttcttgcaactatagtaagttgttactataagactaattataat

SEQ ID NO: 4469 - DNA, 200 bp, Lawsonia intracellularis
gaaaatacaatattcttctatatcaaaatcatcccttagaagagtacttcatgttactccatcactatctttaggtggtacagaaaaaacagcacaactttttgccacttatttaaataaaaaatatttcaatgttgctgtttggagtccttcaagcggcccacgtgctgacattcttaaaaatgcaggtatacctgttt

SEQ ID NO: 4470 - DNA, 200 bp, Lawsonia intracellularis
ggattaatatacctcttgaagctgtcttatatcgatttaaacctcatattgttcatctccatcgtgcaggatggccagaaccaaaactcatgagagctttccgtggaactcactggttccatcatggagtaaaactaccaaagattattgaaactaatgtatttggtagacatgatcctagtcattcaggacgtataatt

SEQ ID NO: 4471 - DNA, 200 bp, Lawsonia intracellularis
gataaaacactatttgtatcacatttttgtgcagaacgtttcagtaatgcttataaagaaaaagttcctagcaatcggtacaatgtgttatataatcctgtggatgtaatgtttatagcaaaacatacaactccgccagaaaaaaaaaactttaggaatgctgtcattggtcgcttatcaagagcagataaaggtaaatg

SEQ ID NO: 4472 - DNA, 200 bp, Lawsonia intracellularis
gtcaatatcttttggcttgcatataattccaacaattatctctcaaataccagacttacagtattatattgttggaggtatacaagaagcatatgactttgttactacacaaaatctttctaataatattagttttttacctgaaattactacagaactagagttagctaattatctagataaactttctatctttgtcc

SEQ ID NO: 4473 - DNA, 200 bp, Lawsonia intracellularis
atgctaatgatacaggggaaagctttggactttccattgctgaagccatgtctgcaggattacctattgtcacacacccatgccttaatttcaaagataatgcacaaacagagcttgtagaacatggagttacgggtcttattgcaactactccaaaagaatatgctgactttataatcatgttgttaaaaaatccagat

SEQ ID NO: 4474 - DNA, 200 bp, Lawsonia intracellularis
attgcccaacgtatgggtatagccggacaaaaaaaagcattccaactttttgatgtttccctccttactcataaacttgaacatatctatcataacctttgtccacctaaccttgcttgtgctatacctagttaatatattacacaacgttggtatacttttctaatatattcaacatagtaaaaattaatatttaaaaa

SEQ ID NO: 4475 - DNA, 200 bp, Lawsonia intracellularis
caccctagttacacagaaaaaatctatttttaacttgcattactaaaaatattttactatggtcaataattcacaggttacatagatatattacttatttatactaagataactctctctagaaatgatatattatatactatcttaataaattacctgtcataactactatctttaaataattatacaaaaccatatgt

SEQ ID NO: 4476 - DNA, 200 bp, Lawsonia intracellularis
atagtagctaattagacaccttataactttatgaaaaaggcagtaaacatgaaatttgctgtaatgtttggcactattcttactattatattgttatatggagcaatcatacctagccatgcatctgagccaattaaaataggtgtatacctcccacttactggtcaaaatgcatatggtggtcaacttgaactagatgg

SEQ ID NO: 4477 - DNA, 200 bp, Lawsonia intracellularis
aattaaacttgcccatgatctaaaccctgttgttcttaataggcctgtacaactttttattgtagataataaatcagacaaggttgaagctgcaaatgcagttaaacgtctaatagatcaagataaagtgtgtgttattattggaagttatggttcttcactttctcttgcaggtggagaagttgctgaacaagcaaaaa

SEQ ID NO: 4478 - DNA, 200 bp, Lawsonia intracellularis
ttcctgttattgggacttcttgtacaaaccctttagtcacacaagggaaaaaatactatttccgtgcatgctttattgatccttatcaaggcgcagcagttgcaacctatgcaaccaaaaatcttggagttaaaaaagcagctacactaactgatgtttcaagtgactactctgttggactgacagctttttttaaaaaa

SEQ ID NO: 4479 - DNA, 200 bp, Lawsonia intracellularis
gcttttgtccatcaaggaggagaaattgttgctaacttaaaatataatgctggagatcaagactttacagcacaacttatggatcttatagccaaaaaacctgacctattatttgtaccatcttacttttctgaaggagctattattattaaacaagctaaagaacttggagcaacatttattttaatgggagctgatgc

SEQ ID NO: 4480 - DNA, 200 bp, Lawsonia intracellularis
tatggataaccctgatacattagaaattggtggacaatctataaatggttttctacacacgacatttccatacgatatccatatgccacatatgagccaagaagcaactaagttcacacaagcttggcgaaaaacatttccttataaggatcctaatgtaaattctgcccttggatataactgttataatattgttatag

SEQ ID NO: 4481 - DNA, 200 bp, Lawsonia intracellularis
atgctattcaaagagcaaattcatcaaatccagaagctattactcatgcccttgaaaatacaaaaaatttacccacagctcttggtatacttactataaataaacatcatgatgcagaaatgcctgttggtattattcaatatcaaaatggcaaaagggtatatcttggagaagttactggagaatagtaataacaacct

SEQ ID NO: 4482 - DNA, 200 bp, Lawsonia intracellularis
agctaaaataatatgctaacctactacaattatatttttaaattaccatctgttaagtaaggcataaaatgattctgaatatattttttcaacactttttcaatgcactaactcttggatcgctttatggccttatagccattggatacacaatggtctatggtatattacgttttattaactttgcacatggtgatctt

SEQ ID NO: 4483 - DNA, 200 bp, Lawsonia intracellularis
ttaatgctaggtgcttattgccttttctatggaacaacactcttcctcctcccatggaaaatttctatcattattgctatttttggagtaagccttattggtatgcttattgatcaagttgcttatagacctttaagagatgcaccaagaacatctattcttataagtgcaattgctgtatctttttttattgaaagctc

SEQ ID NO: 4484 - DNA, 200 bp, Lawsonia intracellularis
tgctgttgtacttttttctgggctaccacgacctgtgtttcagcctgaatggcttatatctcctttttctattagcaagataaggattcttccattaacactgattgtccctattgttagtttctttcttgtattagccttactttggatcatttataaaactaaatttggtcttgctatgagagcaatctctaaagata

SEQ ID NO: 4485 - DNA, 200 bp, Lawsonia intracellularis
ttgaaactacaaggttacttggtgttcctattaaccgtattatagcgctaacatttgctttaggctctgctcttgctgctgcctcaggtattatgtggtctttacgttatccacaaatcaatccatatatgggagtattcccaggatttaaagcttttattgcagcagtacttggtggaattgggtctatccaaggcgca

SEQ ID NO: 4486 - DNA, 200 bp, Lawsonia intracellularis
ctgataggaggactcttacttggttttattgaaattatgacagttgcatttttacctacactatcaggctatagagacgcatttgcttttattattcttatattagtgttactaattaaaccaacgggcatctttggagaatacgtagaggaaaaaatatgaactcttctactcgtaactatattttcaacgttcttact

SEQ ID NO: 4487 - DNA, 200 bp, Lawsonia intracellularis
attggagttatagtactttttctcctttgggcagaatctacttttaatgggtaccaaattcaacttctaaacctcattgcaataaatactattttagccctctctttaaaccttgtttatggttttacaggaatgttttctcttggtcatgctggatttatggcaattggagcatatatatctgcacttcttattctacc

SEQ ID NO: 4488 - DNA, 200 bp, Lawsonia intracellularis
tgctgaacaaaaagaaattatgtggatacttgaaccaatcatatggccattttcagttcttgaaacacctttttggttttctattcttgctggaggactagtttctgcattttttggactccttattgctttatcagtattaagactaggtggtgactatttagctattgctaccttaggattttctgaaattattcgag

SEQ ID NO: 4489 - DNA, 200 bp, Lawsonia intracellularis
ttatccttataaacgttgcttcaattaccaatggttcccttgggataaaaggtattccatctcatacggatctctttgtaacatatggatggttatttcttactctgtttttccttataaaattgttacaaagtaattttggtaacatatttaaatccataagagataatgaaattgcagcaaaagttatgggtattaat

SEQ ID NO: 4490 - DNA, 200 bp, Lawsonia intracellularis
actcttcactataaaacattatcttttaccattggagccttttttgctggcattggtggagcactcctcggaaatttacttacaacaattgatcctaaaatgtttacttttttactaacatttaacattcttatgatcgtagtagcaggtggtcttgggtctataacagggagtatattaggaagcattattattactat

SEQ ID NO: 4491 - DNA, 200 bp, Lawsonia intracellularis
ccttcttgaatggcttcgtgctgtagaaagtcctttcaattttggaagttatcaaattcctggtatccctggaatgcgcatggttattttttctttaatacttttgggaattattctctatcgacgagaaggaataatgggaatgaaagaaatcagttggacaaacataactaaatttttctctaggaaaagagatatat

SEQ ID NO: 4492 - DNA, 200 bp, Lawsonia intracellularis
gaaagaatatgttcaacaaaaaaatcaaaattctatccttgaactacaaaatattgttatacaatttggtgggatcactgcagttaacaacttaactatgaatgttgaaaaaggttctattgctgctatcattggacctaatggtgcaggaaaaactacagcctttaatatgataagtggattttatacaccacataaag

SEQ ID NO: 4493 - DNA, 200 bp, Lawsonia intracellularis
gaaatattttttttaaaggaaaaagtataactggacttcctccatacaaaatttgtcaactagggatggctagaacattccaaaatattcgtctcttttcaaatgaaacaaccctagaaaacattatgttaggatgccatgtacgacgtagttcatattggtggatgccagttataggtgttccttctgcgattcgagaa

SEQ ID NO: 4494 - DNA, 200 bp, Lawsonia intracellularis
gaaaaaaaaataaaaggacaagcaatggaacttatccaacgctttaaccttgaattatatgtaaatgaaaaagcatcttcacttccttatggagctcaacgtagacttgaaatagcacgtgcacttgctacctatccagaacttttattacttgatgaacctgctgctggaatgaatccacaagaaagtattgaacttat

SEQ ID NO: 4495 - DNA, 200 bp, Lawsonia intracellularis
gcatcttattaaaaatatcagagatgaatttaaattaactatcctcctcattgagcatgatatgaagctagttatgggagtatgccaatatatttgggtgcttgaatatggacaaattattgctgaaggtattcctcaaaaaattcgaaatgatcccaaagtaattgaagcttatcttggaggtgaagaaactcattatg

SEQ ID NO: 4496 - DNA, 200 bp, Lawsonia intracellularis
cttaacatttctcatcttcatatttattatggtggtatccatgctgtacaaggggttacattatcggttccaaaaggaaaaattataacacttattggtgctaatggtgctggtaaaagcagcataatacgttcaatatctggcttaataaaacaagttacaggtagtatagtatatactaatgacaatatttctatgcc

SEQ ID NO: 4497 - DNA, 200 bp, Lawsonia intracellularis
acagcagctcttagaacatagtcctgaagatattgttcgtctaggaatatcaatgagccctgaaggaagacgtatcctccctcatctaacggttttggaaaacttacaacttggtgcctatatacaaaaagatgcaaatgaaatacaaaaagatattaaatgggtatattctcttttccccagattacaagaacgttctt

SEQ ID NO: 4498 - DNA, 200 bp, Lawsonia intracellularis
ggcaaaaaggaggtacactttctggtggcgaacaacaaatgcttgctctagggagagctcttatgagtagaccttccttacttatgcttgatgagccatctcttggccttgcaccccgacttgtaaaagaactttttgatatcattcttcaaatcaatgcagaaggaaagacgattcttttagtagaacaaaatgcattt

SEQ ID NO: 4499 - DNA, 200 bp, Lawsonia intracellularis
gctgcactttcaatagcagattatgcctatgtacttgaagttggaaatattgttatggaaggtaacggtcaagagttattaaataaccctaaagtaaaagaagcatatttaggaggatgaagtataactaacctattataaataaatttttatttttctctaaaaaatctttatgtatcttctacttgcaacgtatatat

SEQ ID NO: 4500 - DNA, 200 bp, Lawsonia intracellularis
ttttttattaatttttatttcttcttaaagattacaaatagtatctaatagtatcttttgaagatattttcatatgtatatataatgtaactatagttttctatcttaatatttcctgtatagaaaactataattatagaataagttaacaacttttacctttaccttatgataagtgaggcttataaatgttcttatca

SEQ ID NO: 4501 - DNA, 200 bp, Lawsonia intracellularis
ttttctatagtaatagcatgtggtctttatgctctatattatgcctacaccacctctaaacaggtcttttctgctgatataggtactgaagaaatgcaacaaattgctggagctatacaagaaggagctcaagcatatttaaaccgccaatatagaactattgctattgttggtatcataataactattcttctagctat

SEQ ID NO: 4502 - DNA, 200 bp, Lawsonia intracellularis
ctttttttctttcctagtagcattaggttttgttattggagcatttctttcaggtcttactggatttattggaatgaatgtatctgttcgtgcaaatgtccgtacaacagaagcagcacgttctggccttgcacctgcattaaatattgcctttaaagcaggggctattactggaatgcttgtcgttggacttggtttac

SEQ ID NO: 4503 - DNA, 200 bp, Lawsonia intracellularis
ttggtgtagctctctattatggcctcctttcaatgtttggagtagatcaaaaatctatacttgaagcattagtagcattaagctttggagcatcacttatttccatttttgcacgccttgggggaggaatctttactaaaggtgctgatgtaggtgctgaccttgtaggtaaggttgaagcaggtattcctgaagacgat

SEQ ID NO: 4504 - DNA, 200 bp, Lawsonia intracellularis
cctaggaatcctgctgttattgcagacaatgttggcgataacgttggtgattgtgctggaatggctgctgatctctttgaaacatatgctgttacagttgtagcaagtatgcttctagcagcaatttattttacaggcaaactccaatcaattatgatgatgtatcctttacttattggtggtgtctgtattattggttc

SEQ ID NO: 4505 - DNA, 200 bp, Lawsonia intracellularis
tattataggaacaaaatatgttcgcttaacaaaagacaataagattatgaaagcactctatcgagggcttattgcaacaggaattacatctgctattttaattacattggtcactacactccttttctgggatgtaccaacaatgtctgcacaaggaaaatcttttggtattataaacttattatcatgttcatttgcgg

SEQ ID NO: 4506 - DNA, 200 bp, Lawsonia intracellularis
gattaatcattacagcattattagtatgggtcactgaatattatacatctacagtgtttcgtcctgttcgtagtattgcttatgcatcaactacaggacatggaacaaatattatccaaggattagctatagccatggagtcaacagcattaccagtactaattatctgtgctggtatcgtcttcacttatgctaatgct

SEQ ID NO: 4507 - DNA, 200 bp, Lawsonia intracellularis
ggtctttttggcatctctatcgcagctacaacaatgcttgctcttgcaggaatgattgtagcactagatgcttatggacctgtaacagataatgctggtggtattgcagaaatgtcaaatcttcctagtgaagtacgtactgtcactgacgcccttgatgctgtaggaaatacaacaaaagctgtaacaaaaggatatgc

SEQ ID NO: 4508 - DNA, 200 bp, Lawsonia intracellularis
tattggctctgcaggacttgcagcccttgtgctttttgcatgctatactgaagaactaggtcgatttttcccttctcttaatatacacttcagcttacaagatccatatgtcctcattggtttacttataggaggactactaccatatctttttggttctctaggaatgatggctgttggaagagcaggtgctgaagttg

SEQ ID NO: 4509 - DNA, 200 bp, Lawsonia intracellularis
ttgttgaggtacgtcgtcaatttagttcaattccaggaattatggaaggtacaggaaagccagactatagttctgctgttgatatgcttacaaaagcagctattaaagaaatgattttgccctctattctacctgtatttgcacctatcattatttattgcattatttattggattggaggacaaaatgctgcgctctct

SEQ ID NO: 4510 - DNA, 200 bp, Lawsonia intracellularis
acactaggagcaatgttaatgggaactattgttactgggttatttgtagcaatatctatgacatcaggtggaggtgcatgggataatgcaaaaaaatatattgaggatggacaccatggtggtaaaggttctgaggcacataaagctgctgtaacaggtgatactgttggtgatccttataaagatactgccggaccagc

SEQ ID NO: 4511 - DNA, 200 bp, Lawsonia intracellularis
aattaacccaatgataaaaattattaatatagtagcactgcttcttcttcaagctcttgcttaagtagatagtattaaaaaaatcctacctaaaaaaatctctcctaatatggagagatttttttacacctatagctcatcattatacattaactaacaacatgaatatgctactaaatctactcttataatctagtgaa

SEQ ID NO: 4512 - DNA, 200 bp, Lawsonia intracellularis
atatataaacaaattactgcttgtactctaaacacaactgtaatgacaaaggtagtaataataacttattataagatgaaaaatattttaatcatagtacaatacagttatatagataaaaaagaggaactagcaatcctaaaaagtaaaaataattaagatggtggtactgtttcttttagaggcaaaagatcttcttg

SEQ ID NO: 4513 - DNA, 200 bp, Lawsonia intracellularis
aactttagaaggagctacacctccatgaattaatgaaccagtatctccttttcttaaaggaagttggtatattttaaccattctattatgactgtccaaatttgtactaaaaacatgtgatccatcaccacgagcaacaaaataatagtagttgtgctcttcaggatttaatgctgctcgaatactatcaagacctggag

SEQ ID NO: 4514 - DNA, 200 bp, Lawsonia intracellularis
atgcaataggccctggaggtaatcctttattcacatatgtattatatggattattcttatcttgtaattgactacgacgtaatttcccatcaaagttttcccctaagccataaataactgtagggtcagcatataatggcattcccacagcaagcctatttgtataaacaccagatactttacgacgttcacctgggaaa

SEQ ID NO: 4515 - DNA, 200 bp, Lawsonia intracellularis
tgtgtttctttttcaataattgaagcaagaattaatggctgcttaataacagaagcatttctaaagcttggacgcatcccatttggccatagtggagctgttttcctccaaaatgtgtcaattaaccttccaacaataattttcgcagattcaacgttttgtttaaatggacgtgctaagagatatgtatctggaaataa

SEQ ID NO: 4516 - DNA, 200 bp, Lawsonia intracellularis
aaaaccttctgcattatgaaatggtatcccccaatatctcagaaactcagggtcatgaatgactgttttaaaatcttcaaaacgaacaaatcctgctttttctagacgttttccaacttcccaccaaggaagtccttctggaatagttattctattaagaagtggagaaccagttacaaggtaatcaagaagagcttgtg

SEQ ID NO: 4517 - DNA, 200 bp, Lawsonia intracellularis
gcgtccatcctgtattaataaggaatcgaccactctttactttatcactcattcccttccatttagcaagtatttcaaacttatttacgtctgtaattgcacctatatcttgaagatataaagacagtacatgaaactttgttcctggaggaatagctatttctatctccttaccaggagtagaaccaggcgtatctaaa

SEQ ID NO: 4518 - DNA, 200 bp, Lawsonia intracellularis
aaagaaaaaatttgatatccaataaatccaataacacaaataaatataacaaaaataattaataatagcttaagccataagcttgaggagttgccaggtggtggtcctgaatattcgaactctccagtattaaaactcatacttgaacacgctcactttcagattggtccaaaaatgattgtaaaatacgaacagcagcc

SEQ ID NO: 4519 - DNA, 200 bp, Lawsonia intracellularis
tgttgatcaagaacagattttatcttattttttctgtaaccgacagactgaagatccaactttgcttcgtaactactcaatatttctttcattaaaaagacaggaagcattattttatgtttcaatcgtttgataaaatttctgacctgacgtgtaataagtgtttctgagttatcaaataaaacaggtaagcctacaac

SEQ ID NO: 4520 - DNA, 200 bp, Lawsonia intracellularis
tagtgcatctggagactctacataaattagttcaactaattttataaaaaactctttttgtgttgtcattataattgattgttttggaaaagcaaaaacccccatagagtcactaacagctatccctgtatattttgttccataatcaatagcaacatatttcataatctgttattagcttatgacttcaattgaagcaa

SEQ ID NO: 4521 - DNA, 200 bp, Lawsonia intracellularis
gtcattatcaatctttggtataacaccagctagataatagaataataaaaaaatctcattatacaattatactaaccacccctaacaataaataactattttattcgttaatagttataaataattggatttttataatttaaaattaaactctatgtatataacaatttacaactgctattcttcacgttaaacttata

SEQ ID NO: 4522 - DNA, 200 bp, Lawsonia intracellularis
ttgttaggggagcctaaatgacaaacaaggctgagagtgggatggaccctgacccttggaacctgatgtagttaatactaccgtagggatagcataatagttaactatttatgtatgataatcaaacgtccatccacaaattggacgttttttacttatatctatctttaggataatattatgaatatcacagtaaatgg

SEQ ID NO: 4523 - DNA, 200 bp, Lawsonia intracellularis
aaaacctattatatgtaatgaacaaagtactattacagaccttcttctccaactacaactttcatctgatactgttattatagaaaaaaataaagaacttattcctactaaacatttctcttcaacaatcctggaagaaaaagacactcttgaactcttacattttgttgggggaggttaaaaagctttatatagactat

SEQ ID NO: 4524 - DNA, 200 bp, Lawsonia intracellularis
agaactcttttttattgtaatatgttggagtaataatgcaagatgatacttttcagctcgggaatgttaaattaaaaagtcgattattccttggaacagggaaatatggtaatgatgctataatacctgatattattaaatcctctggagctgaagttataacagtagcactacgacgtgtggaactagacaataagaaa

SEQ ID NO: 4525 - DNA, 200 bp, Lawsonia intracellularis
gaaaattttctttcttatattcctcgtacaatacaactacttcccaatacctcaggagcacgaaatgctaatgaggctatacggatagctcgtatggcacaagctgctggctgtggaaactggataaaaattgaagttatctcagattctaggtaccttcttcctgatggatatgatacagcaaaagcaactgaagttct

SEQ ID NO: 4526 - DNA, 200 bp, Lawsonia intracellularis
tgctaatgatggatttattgtattaccatatatgaatcctgatctctatgttgctcgagatcttgctaatgcaggtgcagcagcaataatgcctttaggtgctcctattggcacaaatagaggattaatgacaaaagaaatgattcaaatacttattgaagaaataaaacttccaattattgttgatgcagggataggca

SEQ ID NO: 4527 - DNA, 200 bp, Lawsonia intracellularis
aaccttctcaagcttgtgaagcaatggagttaggagctgcagcttgtttagttaatactgctatagctacatctgatgatcctatactcatggctaaagcatttgggaatgcaatacaagcaggaagagaagcatggcttgcaaaaacaggacctgttcttacaggcaaagcttctgcatcttcccctttaacaggtttt

SEQ ID NO: 4528 - DNA, 200 bp, Lawsonia intracellularis
ttagatgactcctattaattctttctatcatacattatgcaagtggcctcctaaccaaatacagaacatgttcaactctgttacagagtcacaagtatcgcatacattaaatctagcagaaagaggtctatcactctccatagaacacttattaatattactatcgcctactgcaacttcttttctagaaaaaatggctt

SEQ ID NO: 4529 - DNA, 200 bp, Lawsonia intracellularis
ctattgctcaagaacagacaatccgatattttggaaaaactatacaactttttactcctctctacctctctaatttttgcataaataattgtaaatattgtagttttagcgcaactaaccgtataaaaagaatacagttaacaattgaagaaatcgaaaaagaagctgctgctattgctgcaactgggcttagacatatt

SEQ ID NO: 4530 - DNA, 200 bp, Lawsonia intracellularis
ttactcttaacaggtgatgctccatctaaagcaactatagcttatcttaaagaagctattcaatgtcttaataactattttcctagcgtaggaatcgaaatttatgccattgaaaaaaaagaatacgaattgcttgaatgtactggagtagattctatgacgttatttcaagaaacatataacgaaaaacgttatatggc

SEQ ID NO: 4531 - DNA, 200 bp, Lawsonia intracellularis
acttcatactaagggaactaaacaaaatttccgttttcgtttagaagcacaaagtagagctgcatctgcaggcattcgctttataacacttggtgcactattaggcctagaccactggtggagagatatattttatgtaggcctccatgcaaattggttacaaaatgaatatcctggagtggatcttactatctctgtac

SEQ ID NO: 4532 - DNA, 200 bp, Lawsonia intracellularis
ctcggatacgccctcatgaaggatatttctctgattactatcctgtatctgataaaaaccttgtacaagctattcaagctatacgactatttttaccaacatctggtattattctttcaacacgcgaaaaaccctctctcagagatagattaatatctcttagtgttacaaaaatgtctgcaggagtttctactgctgta

SEQ ID NO: 4533 - DNA, 200 bp, Lawsonia intracellularis
ggagggcatactgatcatcatatagcaaaagataatattgcccaattcgaaattgcagatacacgctctgtagagcaaataattacagcaataaaagcaaaaggttatcaacctatttttaaaaactggataaaattatctaatgcacctatgcattaaaggaataacatgtctacctttcattggaaaaatgttatgga

SEQ ID NO: 4534 - DNA, 200 bp, Lawsonia intracellularis
tgagcacttacctgaatcactgcaaacaaagctttctaatgctactataggtatagcaggtgctggaggactaggttcaaactgtgcggtattacttacccgaacaggaataggtcatttagtcattgttgatcatgatattgttagtgtttctaatcttaacaggcaacagtatttaccatctcatattggtatgccaa

SEQ ID NO: 4535 - DNA, 200 bp, Lawsonia intracellularis
aagttgaagcactaaaagaagttcttcttaacattaatcctgggttaaaacttacaatatatcaacaatacatgaatcctaacaatatcttaactctatttgaagactgtcagtttgttatagaagcagtagacaatgctatcactaaaaaaatgcttgtagaaacacttattactgtagattatactgttatatctgca

SEQ ID NO: 4536 - DNA, 200 bp, Lawsonia intracellularis
tcaggtgttgcaggatggggtgggctacctatgacacaaaaacagctaggcaaaaaactcttagtagttggagatcatacctatggagtatcttctataaatcctccactagcccctcgtgttaatatggctgctagtatgcaggcagatgctatactttgtgcactgctcaatactaaaaacgactaatatctatcaat

SEQ ID NO: 4537 - DNA, 200 bp, Lawsonia intracellularis
accctttacctatcttattaaaagattatattaaactatagtcttattaggctgtaacatagctaatgccagattcttttcatcttgcattctacgtagtgcagatgcttgtatttcagctgttgaagagccaaaaagtgtacctctcaactcataaatacttttaataagttgttgttcctcttggtcaccaatagatt

SEQ ID NO: 4538 - DNA, 200 bp, Lawsonia intracellularis
gtccttcagaaataccaaccatattagcagactgagtaaaaattcttacagcacctgaaggtccatgctgaactgctgtactccataaaacttcatgcattgctggagacaaagattctacttcatatcctgctgctttaataccttttaaggcaggttgataatgactttcagaaataaaacgtttttgtaaatcctca

SEQ ID NO: 4539 - DNA, 200 bp, Lawsonia intracellularis
aaaagttcgggttgttcttgagctatagatctccatacttgcggcattttcccatcacgactaccagtgtcagcaggtcctgcactttttaaccgtgctgctatattaggattttctctctcaagaaactttataaattgatccatacttcctggctttgatgctatttgatacttcccatatgaagttccaccagttcg

SEQ ID NO: 4540 - DNA, 200 bp, Lawsonia intracellularis
atcataacctatagcagaaataccttcatttccagattcaaatcgagcagaaagctgccctatccttgtttcattttgtatagttttatttagagttatattagctgtatttaattctgttttacttctacttattgtctgttgagtattcattcccccatgttttctatttaatgctatattacgggcagaaaaaataa

SEQ ID NO: 4541 - DNA, 200 bp, Lawsonia intracellularis
tatctcttttggcatcaagaggaatccctttactaaaagggatccctttattttctttatgaagtggtatcccagatacagcttgagttaatggtacactatttttatgttgttgattttgaggtaatatagactgcatcaccatttcattttgctgatgttgagcctctcccattgccaatccattagcaaaaaggcga

SEQ ID NO: 4542 - DNA, 200 bp, Lawsonia intracellularis
gaaattacatttaacccttttgtatctttactattttcttgagtttctactgttacttcagaagtttttccaaccatttctgaaaaagattcattgtcaattttttgtcctgaagttctcttaaagactttcgcatgttctggtgatgtaccgccaagaataaatggtgacttggctatagacatataatcccccaaaag

SEQ ID NO: 4543 - DNA, 200 bp, Lawsonia intracellularis
atgatattcttatacattagaatttaacatgcaaattttaggccttaatatataacttagtataaaaatagattataatcccttacttaccttcttataaaatttgtgctcaagaatggttactctccataaaccaagaacacctgctaaagaaagccctcctaatagtgctaaccaaaaaccagttactcccattggct

SEQ ID NO: 4544 - DNA, 200 bp, Lawsonia intracellularis
caacaaaccaatttgttctcccaaggatgtatcctacaggtattgcaaaaaaccaataagcaaaaagtgttatatagaacactgtctttgtatctttatatcctttaataatacccattgtgattgcttgtaatgcttcaaagcattgattgatagcagtaaaaatcattaaagaagttgctacttttaatacttcaaca

SEQ ID NO: 4545 - DNA, 200 bp, Lawsonia intracellularis
tcattattatagattcctgctatttcataacgaagtgtaagaataaatataatagagcataatgcaataaataatcccaaacttagagagacaaagctgacacaatgtaacatttcatatgaatgcctgccaatactataacctgtacgaattgtagcagtaatagcaagcgaaaatggaatcataaaaagaagtgcact

SEQ ID NO: 4546 - DNA, 200 bp, Lawsonia intracellularis
aaaatttagtgctatttcatgtcctgcaataattgtaacacctagaggagcaaccaataaagcaataatagcaaaagatgttacttcaaaaaaaacaccaagagctccagggaaaccaatacgtaacaattgccattgtgtttttttatctatccattcaacccaatttttaaacgataaaaatcttcgaacatctggta

SEQ ID NO: 4547 - DNA, 200 bp, Lawsonia intracellularis
gagtcattgcataacaaaaaataacaaaaaacattacccaatatactatacctgtagcaaagcctgatccaacaccaccaagagcaggtagaccacacttaccaaaaataaaaatatagtttaagggaacattaaaaagaaggcctataaaacctccaatcattgatggcctcataaatgccataccttcaaaataacac

SEQ ID NO: 4548 - DNA, 200 bp, Lawsonia intracellularis
cggataacaacaaaatataaaaagcctggagttccccaggcaatagcccttaaatattgacctgaaagatcagctaattgttcctctaatcctaatttccccatctgaaaagaaagaatatatgcaataaagaacaatggtaaagataaaaaagtagcaagccatatcccctgacgtaggacatgaccaatatgttcagt

SEQ ID NO: 4549 - DNA, 200 bp, Lawsonia intracellularis
gtatccttcacctctccactgtgaaataaccggatgtaatgcctgtagtatcccttgaaaaaaaagaattaaaggaacccatatagaactacctaaagcaacagcagccatatccatggcacttacatatcctgtcataaccatatcaacaaatcccattgcagtcataaatatttgtgcaaggactattggaatagtaa

SEQ ID NO: 4550 - DNA, 200 bp, Lawsonia intracellularis
gttgaatttgagtttttaactctctaaaataatactgttttttcatcacacactatttaaagaagaaattaagaggaatggaatataatatccatacctcttaatattactatatttttcaatgaattcaataaaaagatattgataaaatcccattcagctagtttaactatcaataggttcatctggttggcgtttac

SEQ ID NO: 4551 - DNA, 200 bp, Lawsonia intracellularis
gtcctactgtcagtaatgttatcccacataatacactaaatgtgatcgcaataatatttgacaagtcataagaaataccaaatcccatattttcctcaaaacaaatataagatacacagactgctgtcataaacattgcaggaacagtagcaatccaatgaaaacgttcacgatggagtaagtaggctgctgcagcccaa

SEQ ID NO: 4552 - DNA, 200 bp, Lawsonia intracellularis
agaacaattgccgcaagtgtctgattagcccaaccaaaatatctccaaagaattccaaaagacataaaattcagagcaacaccaatagcaaaaataggaattgtaagtagtagacgatttttacctgatgcctgatcaaaaccaaatgcatcagcaattgttaatcttgcagagcgaaaagctgtatcacctgatgtaat

SEQ ID NO: 4553 - DNA, 200 bp, Lawsonia intracellularis
tgggagtataaccacaccaagaatcgctaaggtacctccaactgttcccaacaaaacttttgaaacctcgtcaacaacaagtgctgcattaccttcaggacctagtgcagcagctaatgctgaagaattttcatagaaagacattcctaacgtaacccaaataagtgcaatgacaccttcggctatcattgctccaaaaa

SEQ ID NO: 4554 - DNA, 200 bp, Lawsonia intracellularis
atacaggccggccatatctttcgttaggaagacatcttgccatcatgggagattgagtagcatgaaaaccacttaatgccccacaagcaattgtaataaaaaccataggccaaataggtaatcctgcaggatgttggttaatcaagttaatacttggataaaacggatatcctttaactattaacatcactaaaagacca

SEQ ID NO: 4555 - DNA, 200 bp, Lawsonia intracellularis
atagccataaaaacaagtaataaagcaaagtatggataaataaggccaataagcttatctattggcaatatcattgcaagaaaataatatgcaaaaataatagatacaaaaaacattgcatcaatacctgtcaatttctcaagaagcccagctggaccagcaacaaaaactacccctacaaggataagtaatacaacaga

SEQ ID NO: 4556 - DNA, 200 bp, Lawsonia intracellularis
gaatacctgcataaggatacgaattgtagaaccaagattatatcctacaatatctggaacagacttaccattgtaccttaaagacatcatccctgaaaagtaatcatgaacagctccaccaaatatagaaccaataactacccaaaaaagagcaataggaccataaagagcaccaaggataggcccaaaaactggtccaa

SEQ ID NO: 4557 - DNA, 200 bp, Lawsonia intracellularis
ggcctgcaatatttaacaattggatcaaaaaaattttaaatggtcccatcttaacatagtcaacaccatcgaacattttatatacaggtgtaactctagagtaatctgcaccaaatatacgctctactaccttcccatatataatataccctaaaaacaaggcaattaacgaaagaaaaaaatatacaattgaggacatg

SEQ ID NO: 4558 - DNA, 200 bp, Lawsonia intracellularis
tggtctccattaaagccgtttctattttattagactatatatagttagttaccttatagttaacttattaattagattaaaacaaaattagattaaaacaaatatatattaatttctaaaaataagcccccccttcacaacataaaacctgaattaagtaaagaaaaatagttttctcagctttctgaataagaaattat

SEQ ID NO: 4559 - DNA, 200 bp, Lawsonia intracellularis
attttacaaaaataaaaaaataactctttgttcacgacaaattatatctgtaaaaaagtctaggataaatgtagataagataaaatactactctggcaacccattaaaataaaaattaatgaaaaagctatacaacactaactaaaaaaattcatataatcctttttcattatagtatatctatctaaaactaaaaataa

SEQ ID NO: 4560 - DNA, 200 bp, Lawsonia intracellularis
atctattaaataatagctacttagattattcattattaaaaccaagtatattcaatataactactccataataaatgtattatttatattgtaattaataaaacaataatatcttattatactattacagtataactgtagataatagttaattatacatatattctaattatatttagagtaatatttaatttatttac

SEQ ID NO: 4561 - DNA, 200 bp, Lawsonia intracellularis
ctagatctttactaacaatttatataataatgtaacatatattattaacaggctctatcattatagaagatatgacttatcttaagctctagttctatttactcatgcatgaaaaggagtgagctcatgctaggtgaatattccattacagaaattataatttttttaataattatagtaagttgtttatggtttgactt

SEQ ID NO: 4562 - DNA, 200 bp, Lawsonia intracellularis
acatgcacataaatctgataaagttatttcggtaaaaaatgcttttttatggtctagtatctggatctctcttgcgcttttatttgctatctatattgggtgtatgtttggccttgaaaaagcacaactttttctaactggatatttacttgaagagtcactctctgtcgataatctatttgttattatggctatttttg

SEQ ID NO: 4563 - DNA, 200 bp, Lawsonia intracellularis
cctctttttctataaaagatgaaatgcaacatagagtactttactatggaatacttggtgcattagttatgcgacttctttttgtggctgtaggcagttcacttgttacactctttggtccttatgcattagctagttttggtatttttgtactatggacagcatggaaaatgtggaaagagcaaaaaaagaagcatagt

SEQ ID NO: 4564 - DNA, 200 bp, Lawsonia intracellularis
gagataatagattactctaagcattggtctgttaaaatagcacgttggttaatgcctgttcatcctcagctagatggacataattttttcataaaagtttcagagcataatagattgatttggaaagctacaccacttttcctttgtcttcttgtaattgaattctcagatgtgatgtttgcttttgactctattccagc

SEQ ID NO: 4565 - DNA, 200 bp, Lawsonia intracellularis
tattattgctattactcaagaaccattccttatatatacaagtaatatttttgctatactaggactacgttctttatattttcttcttgcagcagccaaacgctatttacgttaccttgaaaaatctattattgttattcttgcctacattggatttaaaatgttacttgatgtcgtaggaattatacatatttcaccac

SEQ ID NO: 4566 - DNA, 200 bp, Lawsonia intracellularis
tagttagcttaggaattgttataatttgtttaactattggcatactagcatctctgttcattcctcaaacgactactctttctcataacaatactattcatacataattttactctagagaagtataaagcttaattgcttttaaataatgataagttaaactagttacatattttctttaatactaaaaagaaagatat

SEQ ID NO: 4567 - DNA, 200 bp, Lawsonia intracellularis
aatcaattagtgttagctttctgaatttcgtcagccagtctaataatattattaaaatgttcttgagaaacaggttgaatagaaagtcgacttcctgccttcaaaagttccatccctgagagatcatgctgtaatcgcaataaatttcttggaatagttggatgaaataccttaaccaactgaacatcgaccatatacca

SEQ ID NO: 4568 - DNA, 200 bp, Lawsonia intracellularis
tcttggattttctggcgtagctgatggatcataatgatcattttctggatcttgtgctgtatgatcaggataactttctttaaccactttaacaataccagcaatttcaggtaatttcccactatgataaaaaaagccaagatctcctattctcatttcatctctcataaaatttcttgcctggtaatttcttacaccat

SEQ ID NO: 4569 - DNA, 200 bp, Lawsonia intracellularis
cccaacttgttgtttgatttggtgcagactgtaaatcattgattgagtaacaatcggtatcacttttaaaaagccaatactgcatttctatttcctttattctttgctataatgtactgatttataaaaaagagaaagggatcaatatgcacccttacgtttaactacaacaggaattgtacgagctaatataacaatat

SEQ ID NO: 4570 - DNA, 200 bp, Lawsonia intracellularis
ctaaccatactgaccagttagaaatataataccagtctgtttgtacacgttgattatatgttaaatcatttcgtccagatacttgccataatcctgtaattcctggacgaacctttatatacaaagcataagcatcgccatagcgggctacctcttcttctacaattggacgtgggccaacaagactcatatctcctagt

SEQ ID NO: 4571 - DNA, 200 bp, Lawsonia intracellularis
agtacattccatatttgaggaagttcatctaagcttgttcgtcttaacaacttacctacctttgtaattcttggatcataccgtaacttttgatcagctttccattcatttcttaattcttcattttcatctaaagttttttgtaagacttgttctgcattttggaccatagtacgaaacttcactatccaaataggctt

SEQ ID NO: 4572 - DNA, 200 bp, Lawsonia intracellularis
accctctcgaccaatacgtaattgcctaaaaaaaataggccctggtgattccaaccgtatccaaattgcaataaaacaaatgagtgggaaagtagcaatacctataataatagataaaataagatctatacaccttttaacaactagctttcgtggatcaagcaaattttgtcttactttcaaacaaaggaaagaaccaa

SEQ ID NO: 4573 - DNA, 200 bp, Lawsonia intracellularis
tttctaaaggacgaacccatagaggaataccacacttaaaaaaatcttcagaaacaaggataatggaagaaaacaaagttgtggctaccttctcaagctttgtatggtatatgtcatcttttgataaaagaacaaatgcacagcttcttggatggttagatacaaattgtttaattttttgctctgtctcaaggtacatt

SEQ ID NO: 4574 - DNA, 200 bp, Lawsonia intracellularis
aaagaaggttttaaatatccatcggaagtcttatcctctttatcttctattgtttgatttatagaatacgcatagcccataggtgttaaaccaaattctggatgttttactaaatatttttgaatcaatgaaagaatactaccattgcccaaaaaaattgttggtattccccaccaagattttcttgaaaaatactgcct

SEQ ID NO: 4575 - DNA, 200 bp, Lawsonia intracellularis
aacattacaacgaatgacaggaacaacaattaaacttgccatccaagaggccatataaacaagacgagaaggaagatctgctctaaaaaagaataaataaatagcaatacaaaaataagctaatgaaactgaaagactcaaacttttcacctcttcaggaagaggtggaggcgtagcatcataaagttccttcatataat

SEQ ID NO: 4576 - DNA, 200 bp, Lawsonia intracellularis
taacaaaaatagctacaagaaggaataataataaggtccaatgttgtgaaaattcgactggtgtaaaaatattccgtatatatgcagcaataataactgtacttaaaagtgctatacagtctgagcatactaatattagtgtacgccttgtcgtgaagtttaaaaaaaacttttttaccttaatcatattgtaatgaatg

SEQ ID NO: 4577 - DNA, 200 bp, Lawsonia intracellularis
aactatatattagtatagctaaggttaactaaaaatataaaacaattattgtatgttatccttactagcacataagttatcaacaacttttgaaaacgcttgatgaaattgagtctcactaaatttagaggcatgttttacaagctgctgagtattaatggtatgttcatgtttttcaaaatactcaatagcctttaata

SEQ ID NO: 4578 - DNA, 200 bp, Lawsonia intracellularis
aagcttctggtgtttgttcatgaaagaaaaaacctgttataccatcagaaactgtttctgatgcccctcctttgctataagcaatgacaggtcttcctgatgccatagcttctataggaactataccaaaatcttcttccccagggaagagtagtgcacgacaaccagctagtaatttagccctttcgtccatagaaatt

SEQ ID NO: 4579 - DNA, 200 bp, Lawsonia intracellularis
ttacctataaaaataacacttggacctgccagttgtttaagttttgtatatgcatctccatcaccagcaacaattaatttacgacctgtttccgatgcaactttaatagccaaatctaccctcttatactctacaagctgaccaaaacataggtaataatcaccaacatctcttgtgggtttaaataggtcaagctcaac

SEQ ID NO: 4580 - DNA, 200 bp, Lawsonia intracellularis
aggtggataaataacagaagctgaacgtccccagcaacgttgcacacgttgtgctactgtatgagaatttgcaagaataatatcagggtgtaccgcagaacttatatcccacatccgtaagtaatgaaaaataggacgaatgatagttcgtgttactatacctttattctcaagataagtgtgataacagtcccataaat

SEQ ID NO: 4581 - DNA, 200 bp, Lawsonia intracellularis
acctcatgggagtatgacaataacatatatgtcgagcagaagaatgaacaataagtccttttgcagggccggattcgctggaaattattaaatcatacccccgaagatcaagctgttctagagctaaaggcataagcggaagataatacttatagtaccgagttgcaaaaggaagactattaataaatgtagtataaata

SEQ ID NO: 4582 - DNA, 200 bp, Lawsonia intracellularis
gtcttattttttaataaaggtgaaagttgatccttatctacacagtgagtaaaaatatccgcttgagggtaaagacgacaaagagactcaataactttctctcctcctcgcattcctataagccaataatgaacaatagcaatccgcatattacctctttgtctcagaacttactcactctcttcttgctctaactgtag

SEQ ID NO: 4583 - DNA, 200 bp, Lawsonia intracellularis
agattgtttattgtatgtaaaacatttcataaaaacaatgcatagttttatataacatcgttattctcacatgttaattatgatggtagttatggttatattataataatcaaattgttatagttagttagtattctgaaaaaatttaactctttttttcttacttactactgcaaattatacttataaggagcaaacat

SEQ ID NO: 4584 - DNA, 200 bp, Lawsonia intracellularis
gaagctattccatgttctcttcctagtacttacaatattattcttcataccatttagtgtattagctgcaactggacactacgaattacatggcacagaactttcaataatatgggtaataccttttatttgtatgcttctatcaattgctcttggacctcttataattcctcacttctggcatcataactttgggaaaa

SEQ ID NO: 4585 - DNA, 200 bp, Lawsonia intracellularis
tttctgtcttctggggacttgcctttctcattccctgtgctgttatatttggaatacctctaacagcttatcaactcttacatacaatattccttgagtatattccatttattgtcttacttcttgtactctttacagtagcaggaggcgttcgtctcaaaggtcaccttattggaaaaccaatagtcaacacaggactt

SEQ ID NO: 4586 - DNA, 200 bp, Lawsonia intracellularis
ctttttattggaactatattagcaagctggatgggtactactggtgcagcaatgctacttattcgtccactcattcgtgcaaatgaacatagaaaatatgttatacattctgtaatattttttattttccttgtagccaatataggaggttccttaactccactaggtgatcctcccttatttttaggctttcttaaagg

SEQ ID NO: 4587 - DNA, 200 bp, Lawsonia intracellularis
tgttcactttttttggacaacaacacacctctttcctatgacagttattctttctatccttttacttactatctattttatacttgatagtatattatataaaaaagaaggctctcctttacctcaaaatatatcagataatccaggtcagttaggaattgaaggaaaagtaaatcttatacttttactttgtgtagttc

SEQ ID NO: 4588 - DNA, 200 bp, Lawsonia intracellularis
ttactgtattaatgtcaggagtatggaatcctgatatatctatcaacatctatggaataagcatagctctacaagacctctctagagatattatactcctattattaacaggaatatctctcaagctgacaaaaaaagagtctcgaaaacttaatggattttcttgggaacccatacaagaagttgcaaaactctttata

SEQ ID NO: 4589 - DNA, 200 bp, Lawsonia intracellularis
ggtatttttattagtatgattcctgcaataactatccttagagctggagaacatggtgtccttgctccggttattgaacttgtttttaaagatggacagcctgttaatagtatgtttttttggcttacaggtattctttcatcctttttagataatgctccaacttatctagtattttttaatacagccacaggtgatgc

SEQ ID NO: 4590 - DNA, 200 bp, Lawsonia intracellularis
tactcatctaatgggggaatgggcaaaaactttatgtgctatttctgctggctcagtatttatgggggcagttacttatattgggaatgcacctaactttatggttcgttctattgctgtaacacatggaatatctatgccaagtttctttggatacatgttatggtctatttgtatccttttcccatgttttattttac

SEQ ID NO: 4591 - DNA, 200 bp, Lawsonia intracellularis
ttacatggctctttttttaatgtatgttatcttttcaaaaagtattggtctaaccacttataatcttttcttaataatgcaaagaaataactcaatcatagttatttctttgcaaaaaagtttgctagtgtaccatacttaatacttaatatatgttatcacagtataccattagtatctataataaggtaaggtattat

SEQ ID NO: 4592 - DNA, 200 bp, Lawsonia intracellularis
tatcaaaatacaatgaataaaaataatcttctttataagaatgatgttatcattacattaaataccatgaattataattgaatacctatagtaaattttgcttagtaagataacatcatctgtattaattaaagtagtataaaaaccataatataatatataatgatactaacacataccctcactaatgttttatgaat

SEQ ID NO: 4593 - DNA, 200 bp, Lawsonia intracellularis
atctatactacttatatagaacaagagctgccttacattaatgctgctataaaaaaaagcatagcagaactcccttcatctattcagcctgtagctgaacatattcttctctcaaaaggtaaaagattacgtccaatgcttactatcctcctctctcgactttttggttataatgaggatgatatctatccattagcaat

SEQ ID NO: 4594 - DNA, 200 bp, Lawsonia intracellularis
ttcagttgagtttcttcatgcagcgacattactacatgatgatgtattagataatgcgctattaagacgtaatactattacagctcataacctctttgggactgtttctactatacttgcaggtgacgcactgcttgcaaaaggcaatttacttgtagcaacctatggatgtcagaaatgtatcctaacgatatcccaag

SEQ ID NO: 4595 - DNA, 200 bp, Lawsonia intracellularis
ctctttaccaaacagcacatggtgaaattcttgagatatataatcaaggggaaatatgggaaaacaaaaatatttatttagaaattattactggaaaaacagcttgggttattcaagcagcttgtaaagttggtgcactgaaagcaggtgctactccacaacaggtggatgttgctgctttatttggctataatcttggt

SEQ ID NO: 4596 - DNA, 200 bp, Lawsonia intracellularis
attgcttttcaaatcatagatgatgcattagacttcttaccttctaaagatacaggcaaacctgaaggaggagatatacgagaaggcaaatttacaccaccacttttttactatttaaaaacactttctttagaagaaaaaaatatatttataaaaaaatttcaaactcataactttacagatgaagagatacttactat

SEQ ID NO: 4597 - DNA, 200 bp, Lawsonia intracellularis
taccagggtcatccatgaacaaaattttgatcaaaaaacacgggaattagccaatgtttattttcaaaaagctttaacaaatttagaattattaactaatgttcccaagcctgaatacaaaaccatactcatagaatgcctcaattacatctctacaagaacctcataaatatccttttttatcaggagaaataaatgct

SEQ ID NO: 4598 - DNA, 200 bp, Lawsonia intracellularis
tcatcgtattagcgtgggattattatcccatatcgatgatactattggccaaaaaatagcttcatctatttatcaaacactttcttttcctgttactacagctaacttaataaaagtattcacaatagaagggatacagaaagaacaggtaaaccaacttattactcaaaatgtattacatgatcccatcttacaatatg

SEQ ID NO: 4599 - DNA, 200 bp, Lawsonia intracellularis
cttcactttcaccttcagaaagtaatgcagattggataatagaagtacgtttccgtcctggagttactgataatgaaggtcacacagctagagatacctctgcacttgcattaggaatagagaatcatgaaatattagctgtatacacatcaaaccaatatcatttatatggtacacttacagaacaacaagtacatcgt

SEQ ID NO: 4600 - DNA, 200 bp, Lawsonia intracellularis
attgcaactgaattattatctaatacacttattcattgttttgaaataaaaagtcgacaaaattggaaaaacaatccaggattcccagctaaaacagcaaaagttacaggtatagctaatgatacagtcataactattccactttcttctatgaatgatgcaatgttattacatgctagtaaagaaagaacattagcctt

SEQ ID NO: 4601 - DNA, 200 bp, Lawsonia intracellularis
atctcttgaagagatgcaagtcattcaacgttggtttatgcagcctgaggtaaaaaaagaaagagttgctattggattaacacctgatcctactgatgtagaaatagagatgcttgctcaaacttggtctgaacactgcaaacataaaatttttgctgcacaaatatcttataaagatttagaacaaaattctcaagaag

SEQ ID NO: 4602 - DNA, 200 bp, Lawsonia intracellularis
ttattaatagtctctataaaacatatatccaaaatacaactgacattattagagctcaacttggtgacaaagatttttgtctatctgtttttaaagataacgctggtgttgttgcttttaatgatacacatgacgtctgtattaaagttgaaacacataatagtccctcagcgttagatccttatggtggtgcacttaca

SEQ ID NO: 4603 - DNA, 200 bp, Lawsonia intracellularis
ggtattgttggtgttaatagagatcctatgggtacaggtcttggtgcagagcttgtttgtaatactgatgtattttgttttgcttctccctttcatagggagcctcttccacctcgcttactacacccacgtagaatttttgaaggtgttagagagggtgtggaacatggtgggaataaatccggaatccctactataaa

SEQ ID NO: 4604 - DNA, 200 bp, Lawsonia intracellularis
tggctctatcgtatttgatgatcgctttcttggtaaacctcttgttttttgtggcactattggcattatcccttgcataattaacaataaaaaagggtatgaaaaaaaagctaatgtaggcgactatattattatggtaggaggacgcatcgggaaagatggaattcatggagcaacattttcttcagaagaactacatg

SEQ ID NO: 4605 - DNA, 200 bp, Lawsonia intracellularis
aacaatctcctgttactgcggtacaaattggagatcctattactcaaagaaaaatgtatgacttcattttacatgtacgagatcttgggctctactcagctataacagacaatggtgctggaggcctttcttcgtctataggagaaatggctcaagatacaggaggatgtcatattgatctttctaaggcactattaaaa

SEQ ID NO: 4606 - DNA, 200 bp, Lawsonia intracellularis
tacgatgggttatgtccatgggaaattttactttcagaagcacaagaaaggatgacaattgctgtaccaaaagaaaatattcaaaaactttcttctattgcaaaacatatgggtgttgaaatttccatcctaggtgaatttacaaatagtggatattttcatgctacatatggttcaaagactgttgcatatcttaatat

SEQ ID NO: 4607 - DNA, 200 bp, Lawsonia intracellularis
ggaattccttcaccatggagtacctcaactaacactcaatgctcaatgggaaaaaccttattatcccaataatagaatagaatctgtaggtattgaccaatctatgttccttcataccatgcttggacggcttaacatctgtagtaaagagtatgtcattcgacagtatgatcatgaagtacgtggaggtagtgttataa

SEQ ID NO: 4608 - DNA, 200 bp, Lawsonia intracellularis
aacctcttatgggtgtaaaacaagatgcacctatggatgctggtgtattacgacctattttaaattcagaaactggacttgttattagtcatggtatctgtcctaagtttagtgactatgacacatattggatggtagcaaacgctattgatgaaggaatacgtaatgctgtagctgttggagctgaccctgatcgtatg

SEQ ID NO: 4609 - DNA, 200 bp, Lawsonia intracellularis
gctggtgtagataacttttgttggtgtgatcctattcagtctgagaaaacacctgatggcttatataaacttgctcagcttgtaagagcatgcaaagcgctatctactttctgtttacactatggtgtaccatgtatttcaggaaaagattcaatgaaaaatgattatataggagggggaattaaaatttctattccacc

SEQ ID NO: 4610 - DNA, 200 bp, Lawsonia intracellularis
aacattacttttttctgtacttggaataatagatgacatcaataaagctataacatctgactttaaaaagcctggagatcacatttatattgtaggcgatacagcatgtgaacttgctggaagtgaacttgctagtgaactacatataagctgtagtagtgtacctcaagtacatgctattcaagctaagtctaactatc

SEQ ID NO: 4611 - DNA, 200 bp, Lawsonia intracellularis
gtaagatatatagcgccatacaaaaaaaatatattacatcctgccatgacctatctgatggaggttttgctgtagcacttgcagaaatgtgtataggtgggcgcataggatgtcatgttgaacttgatagaatacctactattgaaaatctatcagtaacagaactgttatatagtgaaacagcaagtagactcttactt

SEQ ID NO: 4612 - DNA, 200 bp, Lawsonia intracellularis
actgtttctccagataatatagcaccatttgaacagctaatgggtggcagtgcaaaatatttaggaagagttgtcgagcattcacaattgattataacaaatggcaatactataattattgatacacctgttgaacaacttgcagtatcatttaaatctacattaaattggtaataaaagaaaaaagacaaaaatctcaa

SEQ ID NO: 4613 - DNA, 200 bp, Lawsonia intracellularis
agtactatgtacttagtttttgtcttttttctttttatgttagcattagcacaatattaactatcataaaatgaacgtaacacttgactacgtacaggatgacgcaacttacgtagagcttttgcttcaatctgacgaatacgttcacgagtaacattaaagagtttaccaacttcttctagtgtatgatcagatttttc

SEQ ID NO: 4614 - DNA, 200 bp, Lawsonia intracellularis
tccaataccaaatctttttcgtaaaacctgttcctcacgaggtgtcaagtcagcaaggacagaagcaatttgttcagaaagctttgtgtttacaacctcttcagaaggtgctacagcttttttgtcttcgataaaatcacctaaacttgaatcttcttcatcaccaattggtgtttctaacgaaataggttctttagcta

SEQ ID NO: 4615 - DNA, 200 bp, Lawsonia intracellularis
tttttagtactttcttcaccttatctaaagggtagtccatacgttctgcaatctcttctggggttggatctcttccgaactcttgaacaagatagcgtgaagttcgtatcaacttattaatagtctcaatcatatgtacaggaatacgaattgtacgtgcttgatcagctattgctcgagtaattgcctgacgaatccac

SEQ ID NO: 4616 - DNA, 200 bp, Lawsonia intracellularis
caagtagcatatgttgaaaatttatatcctcgttgatattcaaatttatctacagctttcatcaagccaatattaccttcttgaataagatcaagaaactgtaatcctctgtttgtatacttcttagctatacttacaacaagacggagatttgaacgaataagttcttgcttagcacgcattgcagcattattaccccg

SEQ ID NO: 4617 - DNA, 200 bp, Lawsonia intracellularis
cttaatacgccaaagcacctcctcaagatctacaacgttgtgacaacacttttcctgtaaacgttgtaatatttctattttcccaagtatcatttctttgtaagagaaaagctcatctacacccatattgagtaataatgcagcatctctaggacttaattcacgtgcatctaactttgtaaacaagtctttaatttcat

SEQ ID NO: 4618 - DNA, 200 bp, Lawsonia intracellularis
cttgtgttttcccggttgaaagaagatatgctgaaagttccctttgacaattatgcatttgacggacataatcttcaactgtttcaataattctatctataagtgtcttttctaacttaatatcacgtaaacgagtaacaatttcttctttaaattgtaaaatttctttttgaatacctgccacacgacgttccagtgta

SEQ ID NO: 4619 - DNA, 200 bp, Lawsonia intracellularis
caacactcgtcaagtttaagataaaccttacgtttctttttaaaaatttgacgaatttcttctaacagaagaataaccctatttctttggctcatttcatcttcactaggatcatcttcttcaatagttttgacaacgtccttaagtttaattctattaagtttaagatcttcacctacacttataagttcttcaacagc

SEQ ID NO: 4620 - DNA, 200 bp, Lawsonia intracellularis
aacaggaacttctacaagagcatacaatacatcttgctcgcctgtctcaacctttttagcaataacaacttcaccatcacgatctaaaagaggcacagcacccatttcacgtaagtacattcgaacaggatctgtacttcgagaagaaaaatctgctacatcctctgtatcaactaaatcaaaacaattttctgaagtat

SEQ ID NO: 4621 - DNA, 200 bp, Lawsonia intracellularis
ccccatctgtttcgggggaagttactgttattttttttccttccttctctgaatccacaataacaatttcaagttgatcaaaaatacctatgatctcttcaaactgttctggtgtgttcatatctattggtacagctttgttaacttcttcaaaagttacaaaaccagcagccttacctttagcaataagtgtacgtatt

SEQ ID NO: 4622 - DNA, 200 bp, Lawsonia intracellularis
tgttggatttctttaacgttattccccatgtgtcctctccaaagtttcctgaagggcgcgtaaatatttcaaatcagcttcaaagctacttgtttttccaagctttaatgctgctgaaacagaagcagactgaacagtcatatgcaatgcttctaacatagtttgaatagcttcaaactctccctcctcattatctaaag

SEQ ID NO: 4623 - DNA, 200 bp, Lawsonia intracellularis
gtggaacatcacctgtacgacattgaacccaaaaagttttttcttgtgagtttaaatactgcattatattatcctcagaatattcttctacttttccccataattctttggcccaagttgtattaagaacaagatgtgctccctgctcttttagtttgtctaacatatggggatagcgcactagaaacattaaaatttgt

SEQ ID NO: 4624 - DNA, 200 bp, Lawsonia intracellularis
ttatcccttggtgtagtttgaactaaagaatgagatattgctgcagactgtgttaccttcttcttaatagaatgctttatatctgccacatattctcttaattcactctctgccagacctaatcctgttgatagtattgacgtaaaacgacttactatttctggtaattcaacttgttttaaaaaatttttaacccaatc

SEQ ID NO: 4625 - DNA, 200 bp, Lawsonia intracellularis
gataacatcacgaggagccctagttttaagtgattgtatacaaaactgtagcccttcagacgcgtcattttttaacttctcaaaaaattcttttccataattttttataacactatctatatcttcaccttcaggaaacaaaacaaccttacaatttaaaccttttgtcaaaaacatttcacaagctcgcagtgctgctt

SEQ ID NO: 4626 - DNA, 200 bp, Lawsonia intracellularis
tacgacctggagcgtctccatcaaataaaatctcaatatttgatgtaaaacctgaaatacgttttacttgttcagaagtaagagctgttcctaacacacctacagcattagtatacccatattgatgaagtgtaataacatccatatatccttcagtaattaatatagacttccctgaactgatactttgccttgcttgt

SEQ ID NO: 4627 - DNA, 200 bp, Lawsonia intracellularis
tgtaagccatatagttgatctccttttttataaagcaatgaatcactactattaatatattttgctgtatcttcatctccaataatacgtccaccaaatgcaataatatttcctgataaactagaaataggaaacattaatctcccacggaaacggtcataaaacttcccattagaagctataccaactaaagctgcttc

SEQ ID NO: 4628 - DNA, 200 bp, Lawsonia intracellularis
aactccaaattgttcatgaaatcctgcacgttttaaagctcttactaaagtatcccaatcagatgaactccatccaaggcgaaaatattgagaaatttcatcagaaattcccctttttttcatatattctctacactcttttcctatttcactatgaagattatttacaaaatgtgttgtagtaaattcatatatcttta

SEQ ID NO: 4629 - DNA, 200 bp, Lawsonia intracellularis
atagttgacgtctattagtatgaactttctgtgattcattcccaaaagtagaaaatctagtaagaataacacctgcttcttctgctaattgttccaaagtctctcgaaaacttaatccatttatttggctataaaacgtgaatatatctcctgaggcttgacaaccaaagcagtaaaaaaatccatcctcctcactcaca

SEQ ID NO: 4630 - DNA, 200 bp, Lawsonia intracellularis
gaaaaagaaggttttgtctcttggtgaaaaggacatggtgcaacccaacgtgaaccatttctatgaagtttcacatattgacggacaatatctactatgttcaggcgtgacttaatctcttgaatagcctgaacatttttctgactcataactttgtcctacttttatatacttttatgtattatacgaaaattggcagc

SEQ ID NO: 4631 - DNA, 200 bp, Lawsonia intracellularis
atgttacaatagttatacatttatatctctccttacattatactgtagtgagtaaataatactctataaccattataaaagaactaattattattaatattacaatataactttaactagttaataaaactaattaacatgtaacataccaaaattgacaatcttttttaactattatagctgaaatataattacattat

SEQ ID NO: 4632 - DNA, 200 bp, Lawsonia intracellularis
agaaaataaaatgttactatatagagctataccaattaatttagtcttaaaaataattctcaaaatagtacctaataagttgtatttataataataagtaaaagttgttaactaagaatcaaaaaataataatttataacataacgctatattgtctattattgaaacatagcctgaaatttaacttttacaacttcact

SEQ ID NO: 4633 - DNA, 200 bp, Lawsonia intracellularis
taccattttaccactaactttcccattgtactgagacaaaatatactgaataactcttcccatatctgacatttttgtaacacctaaaaagtttaatgtgttatctacaacctgctctaactcttcagaagttaattgttcaggtaaatatgttttaagaatatcaagctcagcagattctttactaacaaggtccaacc

SEQ ID NO: 4634 - DNA, 200 bp, Lawsonia intracellularis
ttccagcagcataaaactgctctatagcatcctgtctttgcttaacttgtctttgaataagattaagcagctcactatcagtgataggacgctttagttcaacttgaagatgtttaagtgctgtctttagcaggcgtaatacattcaggtgtatttgatcttttgacttatatgcagacaaataatttttttcgatatgc

SEQ ID NO: 4635 - DNA, 200 bp, Lawsonia intracellularis
tctataagagacatatgtgccctcataaagacacgggaagtcactatttgactccccgtgtaaattaagtcgttactactctaaagtctattgctttgcaataataatttagagaatttattataaactatcctcattattacatataaaaaagtatacaaatactttttattctatgcattcatctttctaattttttt

SEQ ID NO: 4636 - DNA, 200 bp, Lawsonia intracellularis
caatagccgttttcgtgcagcagcttttttctttttacgcattacactaggcttttcaaagtgctgacgttttttcatctcagagagaattccagctttttcaacttgttttttaaaacgacgtaatgctatatcaaaattataatcgtcttctgtaagataaacaccaggcataggcatcacctcctattcaaatattg

SEQ ID NO: 4637 - DNA, 200 bp, Lawsonia intracellularis
cctaggccaactgactctgacagctcaaagtatagtttgtacttctcaaaaatacaagctcaaaaagtgaatatatctatcattaatgagcacactaaacttactccttattatgtagatagcaaaaaaacatatatcctatactaccaagaaaaaataatataaaataaagcgttcctaaaaatactgcaatttcaaaa

SEQ ID NO: 4638 - DNA, 200 bp, Lawsonia intracellularis
gtccaccatgggatatcatgtgggagaggactatggattgcctcatgtaacaacatactattctactttttactttacagcatcttttaatgcttttcctggacgaaattttactacctttgatgctggaatagtaatcatttctcctgtacgtggattacgtcctttacgagctttacgagattccacagaaagtgttg

SEQ ID NO: 4639 - DNA, 200 bp, Lawsonia intracellularis
caaatccagttaaagttaatttgccttccttagccaatacttcttcaatacttattaatgttgcattcaatgtacgctctgctgcagccttagtaatattaaccttagatgcaatttgggcaacaagatctgcttttgtcataatccttctccttttccgtttaatctagctgtactatataccaagctaaacactttgt

SEQ ID NO: 4640 - DNA, 200 bp, Lawsonia intracellularis
tcaacttgaaacaataaattatctcattaagttaaactaaatcttaatatacatataaacattattctaagtacattaatgcatatagctcaatcatgttttttttggaaagtcaataagttggagtaaaaactcctgagataactgctgaaataattgatttgaaagcgactcaggtcttgctgaaggggaaatgccaa

SEQ ID NO: 4641 - DNA, 200 bp, Lawsonia intracellularis
tacgttctaatgattcatagtagttcaaaaaacctatttttcgtaaaatagattgcatttgttttctcctatgttgaaaacactgttttataatccaagcaaatgttttactatttttaggttgttcttctctaggttttgggtaaagagtaactatagcagagtcaacttttggttgaggataaaaagaatgtggcttt

SEQ ID NO: 4642 - DNA, 200 bp, Lawsonia intracellularis
acaataaaaccccattctactttagcaaagctttgtacccatacagacagaacaccatacgatttagttcctggacatgcacataatctatctgcaacctctttctgaaccataaatacagctctagacattgactggaccctacttacaatatcccaaattaacgccgagcctacattataaggaagattactaataac

SEQ ID NO: 4643 - DNA, 200 bp, Lawsonia intracellularis
tttccaagagccacaaagtgtttcccaagaaaacttcaatgcatctaaatgatgaattgtaacttttgatacattctgttgtttcactgaagaatgataatctacccagcaagaatctttttccacaagtaacaactgacctgggttatagccatatatatgccttgttaatgcaccctgaccagggccaatttcaaaaa

SEQ ID NO: 4644 - DNA, 200 bp, Lawsonia intracellularis
tattctcaccttcatggatatccaatagcttaactatacgataagcaatagctgtatctttcaaaaaatgttgtccaagactctttttaggccgaaaggtttgatccatactcttattaacgtattctcattactgtctaaatataacaattaacatatgaagctcatcatatattaatcaataaaaaaaggatacaaca

SEQ ID NO: 4645 - DNA, 200 bp, Lawsonia intracellularis
ctatacaattatgatacacaatatagataatgatgaggaaagattatgcacgtcatatttattaactatgggggataccttggatgctctggggtccatattcattttcttgcacaaaccctcacacagcaaggaatacgctgtactgtttaccttcctgtaacaataaaatcaaaaaactactttggccaagcagatta

SEQ ID NO: 4646 - DNA, 200 bp, Lawsonia intracellularis
tcctatttttacacataatgatcttgttgcacactctcatactggctactttaaagactctattattcatgcttggaccccgagagaagttagtcgaaaattaactatatatgtagtcgcccaaacacatgttccctattttgttcatctagaagacaatgaaatcactataatggaacaaatgtttaataaaccattta

SEQ ID NO: 4647 - DNA, 200 bp, Lawsonia intracellularis
ttcaactacaacaagaagctttagaaaagcctgcactctttaaagatgtacaatactgtcacccactctattttcaacaatttcttaataatgctactggtgtcacatgtattattaataaacttgaagaacatgtcccttctcatgtacctcgaatgactttttggcctgcctgtgaagaaacttttttccgtcttcca

SEQ ID NO: 4648 - DNA, 200 bp, Lawsonia intracellularis
gaaaaaatacctgagtccgtctataaagaattaggattccctttaaatactatatttgttgtttatcctgggaatatacatgaatacaacaaaaaacatgttagtaatcttatcacagcaattgactatgttaacaaaaaaggacactcaataaagatcctcagatgtggagaaacagctataccaatggagcaacttgc

SEQ ID NO: 4649 - DNA, 200 bp, Lawsonia intracellularis
tccccctcatgcattagcacatatcattgatttagggacacctgaagctcataagcttcataactatattagcttagcacacattcttgttcaaccaggatgtcctggagattttgatgattatcgatttccatcaaaaattcctttattccttgcaagtggacgacctgttattttacctaatacaaatattggattaa

SEQ ID NO: 4650 - DNA, 200 bp, Lawsonia intracellularis
acatgacacatgggaaaaactgtttacttctaaaaacaggtagtgcagaagaaattacaaagtatctatgcctacttatagaaaaccccaaaatagcaacatccattggaaaacaaggaaaacaatttgcttatagtacgttcagttgggaaaaatcagctaaaaaacttatacagttttataaaaagtgtttaccaaac

SEQ ID NO: 4651 - DNA, 200 bp, Lawsonia intracellularis
ttataagatatatctgttaaaaagtaataaacaaataccaacataaaaatatcttttaaaaatagctagttagacatacgtgacaaaataagttcgacttcatctacagctagtccagtagaacgagcaatctgagcaggtgtttgtccttttttctttccagctaaaataacttcacgtaaaaattgtggggaacggct

SEQ ID NO: 4652 - DNA, 200 bp, Lawsonia intracellularis
tatactagttgcttgatcaataagcttctgtaaaactctaatacgctcttcaagccctttatttaatataattaactgctcttgtctttggctaaaactatccacaagctcctgttctaatgctgcattacgataaatactctcaaggacatgttcttgattactttgtagctgggctaaaatagcttcagaacgtctca

SEQ ID NO: 4653 - DNA, 200 bp, Lawsonia intracellularis
atcttaaaaaaaacaaaaaaaccatcacaacaaggatagtttccgcaatagttataacaccaatgatccaaagtggaaatatcataatgataatcaaaccttacggttcacaaagttgccaaggtgatctacttcatcttgaaaaatttctgagtcttcctctttgacttcttccttagctgactctttctctttatact

SEQ ID NO: 4654 - DNA, 200 bp, Lawsonia intracellularis
ccttaagcattttatcagaattcttattattactatgaggttcttcatctagcgatataaggagacttataccatctataccttgtacttggcttccttgctgactcaatgcctctgctactacttgacgaaatgttgtttgtgatgtttctggatgtgtagcttcatcttttattatctttcctgcaggtcccatttgc

SEQ ID NO: 4655 - DNA, 200 bp, Lawsonia intracellularis
tgtataaagagaagtggagctatgggttctattggcatagaggactcactttacaatataattttcaagaagaatatcctccattttcccactaataaggtaactgtttacaatatcaagtaaatcttgcttaatcactaaagtattctttggatcaataagatatccatgtgtcttattacttagataatagtatatag

SEQ ID NO: 4656 - DNA, 200 bp, Lawsonia intracellularis
catctcgaagaacaagctctttacttttagattcttttatgactttttcatctttagaaactccaacaaatgttgccttaagaaattttacactattaccgctaggctgtgcaacagtaaacggctcaaaggtaattttgtactcttgtggtcctgtaattttctctactgaaggaacaataacaactgttggttcaggt

SEQ ID NO: 4657 - DNA, 200 bp, Lawsonia intracellularis
aatgttggttcttctactggtggaacatcttggaaaaaaagaaaccaacttatagcaattacaataataaaaatagataatataataacagcaattttctgttttctaagtttttttcttctaagtatactatcctgatcttcttcactagccagggtatctgttaaagagtgagatatttctccaggagccttaagtgg

SEQ ID NO: 4658 - DNA, 200 bp, Lawsonia intracellularis
tacagcttcttcttctgtatctaaaagaaaaggtgcatcctcaatatctagctgaactttttgacttttactctgtgtggtgtctgatgattgtaactctttgatattggattgtttttcctctggtgattcagtgtccatccaatcctctcctttaactccatctcttaacattagtttgctaattaaaaaatgggcag

SEQ ID NO: 4659 - DNA, 200 bp, Lawsonia intracellularis
agtatcctccacccatttacttataacttgtttgatataaaatacctatagaaacaaggttaatcaaaaattttatcaattttttgtttcattgtctctgcagtgaaaggtttaacaatataatttgagacttttgcttgaacagcttcaataatattttcttgttgtgcttctgctgtgaccataagaaatggaagttc

SEQ ID NO: 4660 - DNA, 200 bp, Lawsonia intracellularis
gctatattgttcactagcacggactttacgtaataactctatacctgtcatttgtggcatattccaatcagaaacaacaaaatctattttttctttattaatcatttcccaggcagtagtaccatcatcagcctcaacaacattattaaaaccaagttgacgtaaaatatttttgatgatacgacgcatagtagaaaaat

SEQ ID NO: 4661 - DNA, 200 bp, Lawsonia intracellularis
cgtcaacaaccagaaccttcatattcaagtcatatgacatttcaaagctccttaatcttaaacagctttagtcaaccttaccatactggtttaaaaactctcgcctgagccttgttaatgcttgtgaatgcaattgagaaacacgcccttctgtaatacccattacagacgctgcttcactcatatttagctcatcgcta

SEQ ID NO: 4662 - DNA, 200 bp, Lawsonia intracellularis
taataaagcgataataccaacttctctctatctgtcaatgtgtctatgagtttcgaaactctatctgctatctctgtagcagctgtatcttcatatggagcaccctccttttcggaagtatgatgtgcaactgtatcttgaataacatctaaagataaaaaagcattattctgaagagcttcaagtcctattcgaatatc

SEQ ID NO: 4663 - DNA, 200 bp, Lawsonia intracellularis
cttaatagctaatccagtaacttcatgtagctcctcttctgttgctggacgacctttttcattttctattttccatgaggccccatcaatttgacgaatacgttgccttaacgtacgagaaaaccaatctaacttccgtaactcatcaagcatagcacctttaattcgattctcagcatatgtttcaaaccgaataccta

SEQ ID NO: 4664 - DNA, 200 bp, Lawsonia intracellularis
gctgaggacgaaatcttcctagagcttccattaatcctaaagatccagcactaattaaatctgaaagttctatattcttaggaagcttagctttaaggcgtgatgcaagaaaacgaatcttaggtgcataatgacaaacaatagcctcctgatcaaggtcagaaaagtctggccaagtaacagaaccagattcaagcttt

SEQ ID NO: 4665 - DNA, 200 bp, Lawsonia intracellularis
tcccatggtttattgtctgaaaaggaactttttccagaaaaatttgatattgccatcaagggccaccggtacaccccaactttgaattgtttctgcaacctcttttactgcaagtgaagctgcactttctggagcttctaaacaaaatggcttttgattaataaccgctttccgaacatttggatctcggggtataatac

SEQ ID NO: 4666 - DNA, 200 bp, Lawsonia intracellularis
caatgagatctaaagatatactttttaaaaactgttcacatgccatatgaagtctaacatatatttcttttgctgacttagtatcttgagccatattaactaaaactctaaagttatcaacaccatgatggtgatttataactttaattaatgcatatgcatctgttaaagaagtaggctcaggagttaaaataactatc

SEQ ID NO: 4667 - DNA, 200 bp, Lawsonia intracellularis
cgttcttgtacagctaagttaaaataaaggacagtatcattaatacctgcaccagtatctacaataaaataatcaatttctttttcaagcatatctacagactctagtagatctaacttttgtcctgtagataaatttaacatatccataacaccagatgacgcaggaagaatgctaaacccataaccagtagcaactat

SEQ ID NO: 4668 - DNA, 200 bp, Lawsonia intracellularis
tatttcttctaacgaagctccctcatgaaataaatgaaaaagatttttttcaggtgacatcccaagcataatatctacattggcaagtcctaagtctgcatccaataaaagcactttcttaccaagtgctgcaagacaataggctaaatttacagcaatgtttgttttaccaacaccaccttttccagatgtcacagaaa

SEQ ID NO: 4669 - DNA, 200 bp, Lawsonia intracellularis
acaccaaaggaaaatcttttgccatttaaatacccctcaaaaattaacagttggccttggtatatctctatacctgaccaggtaattgatgcttaaaaacaagcttccaaagaacagattcataagccgaagatagtgtatcacttaaccctataccataactcaatgcagaaataggtagacctgttgccattgcgaca

SEQ ID NO: 4670 - DNA, 200 bp, Lawsonia intracellularis
ttaactatagagccatatgttgctgcttcatctagctttgtccatacaatactactaagatgttgactttgatattttgaaagaaaagcttgattttgaagtgtagcataatgtggaggcaaagctaaatgcacaacaaattccatgctagaaagccctaatgcggataattgcattgttaatgtctcttttggattact

SEQ ID NO: 4671 - DNA, 200 bp, Lawsonia intracellularis
aatacctgggaagtcaatgaaaagatagtctttatcctcattttgctctattactttttccatagattctggatcacttgcctcgaagtatccaaactcggataactctgcccagtgttttaacacaagtctgctattcgctcgctcacagtctgcattaataaaacctattcttatagatggatcagtttttcgtaata

SEQ ID NO: 4672 - DNA, 200 bp, Lawsonia intracellularis
ataatgccatacgtaatgcagacgttgtcttacctgcaccaaaaggtcctgttatcccctgtatacgctctggccagctctctgccgaccaaggtcttataggaacaatttctgacaatgcttcaaaaggagagctacccggaacagaagataatctatgatataactccataatgacagcatcatcaacttcttcacgc

SEQ ID NO: 4673 - DNA, 200 bp, Lawsonia intracellularis
tgtaaatactctagtgctgtacgctgtcttgaagaaagacgctcccactgtatagatggttgcatgagggcatagagatgctctttaacttttgtccagtccctaaaccactcgtcccaaccctgaggagggctctcaccattcaagttattactattattacctcctgaagtaataggacgatctatacctgctgtaac

SEQ ID NO: 4674 - DNA, 200 bp, Lawsonia intracellularis
ttcatattgccgttgcccatctttttggaaatctcgactagataaaataatagcacttggacctaattctgcttttacctgagcaagaacggactgagtacttggacctataaatgtttttacctgcattaatcaatctccacattccctacagcttgaagtcttgtatctggtggaatttcaccttgggaaataacagg

SEQ ID NO: 4675 - DNA, 200 bp, Lawsonia intracellularis
aacattagggagaaatctagtaatcaattgtgctaaatgtggacgcacaataggagtagctaataacactggttgaccatctgttcctacagctccttcaatagccatattaatattatgaataagctgttgtgcaatggatggattaagtgcaaggtatgatccaccctctacttgtcgtattgcctcttgcaatgttt

SEQ ID NO: 4676 - DNA, 200 bp, Lawsonia intracellularis
gctctgtcttagagcctaaagtaatcacagggagaacaccatcactatctaaatatgctttagtaatactccgaccaagacgctcacgtacatattctgtaagtgtgtcaggattcttaactgaaccaccataatctcctaatgcttcaacaatagttaacatatcacgaatagaaacattttctctcactaaattctgt

SEQ ID NO: 4677 - DNA, 200 bp, Lawsonia intracellularis
aatactttctgtacagaaccaagaggtaaaattccaggtacaagctcttccacagctttgggagagtgctttgctaatgtatccaataaaccctgcacctcctgacgtccaagaaaatctgctaagtgacgctttaaaacctctgtaagatgtgttgcaataactgttgaaggatcaactactgtatatcctgcaagcat

SEQ ID NO: 4678 - DNA, 200 bp, Lawsonia intracellularis
tgtttcttcgcgctgcatttcagaaatccatatagctggtaaattaaaagctggttctcttgtttcaataccttctatctggtgtaatgcattaccaggatccattgctaagtaatgatcaataagaatttcagcagtagcaacttgatttccttttataagtaaaacatattgtcctggtttaagttgtaagttatctc

SEQ ID NO: 4679 - DNA, 200 bp, Lawsonia intracellularis
ttaaatgtagagatgggataataacacccatatcaagagcaaactgacgacgtattgaacggatccttgaaagtaaatttccattttgttcctcatcaacaagagggataagaccatatcctacctctagctctaatgtatctaaaggtagtaaatcttgcatttcctctggtgtatttgcaggctcactagcagcacta

SEQ ID NO: 4680 - DNA, 200 bp, Lawsonia intracellularis
ccacctttagccttctttttatcttgtgcagttgtatctgaatttttacctacaatacgagaaactataaataaggaagctgaaaagaacaagaatggaatagttggtaaacctggaacaagggcaaatataaaaagaactgcggatgttaacttaagaacacgtgaattatatgttagttgtgcaatatattcttcacc

SEQ ID NO: 4681 - DNA, 200 bp, Lawsonia intracellularis
cattttagcttctgctgctgcacgtgaaacaataagaccagcagcaatggaaataataatagaaggaatcgtagaaacaagtccatctccaatagagagaagggaaaatgtcataagggcactatcccaactcattcctttttgcacaacagcaataagaataccaccaatcaaatttataagggtaataaacagtcctg

SEQ ID NO: 4682 - DNA, 200 bp, Lawsonia intracellularis
cagttacatctccttgtacaaatttacctgcaccatccattgcaccataaaagtcagcttcctttctaatattttcgcgacgcctagttgcttcttcttcatcaattaatccagaatttaaatctgcctcaatagccatttgttttcctggcatagcatcaagagtaaagcgtgctgcaacctcagcaatacgtgttgta

SEQ ID NO: 4683 - DNA, 200 bp, Lawsonia intracellularis
ccagctgtaataacaactttattcaaaataaataaaattaaaaagataacagcacctacaacataacttccacctacaacaaactcagcaaaagaacgaataacattacctgcagcatttgcaccttgatcgccattaagaaggattaaacgtgtagaagctacatttaaagctaatcgcattaatgttgtaacaagaag

SEQ ID NO: 4684 - DNA, 200 bp, Lawsonia intracellularis
taatgaagggaaaatagaaaactctaaaggagaagtcataaacattgctgttaaaagaatcaaaatagaaagagaaatattaagggaaagcatcacatctagcaaaaacgtaggaagagggacaagcataacaagaagaatgacaacaacacctgcaccaaggaatatatcaccttgcttagcaaaacggctgtaattta

SEQ ID NO: 4685 - DNA, 200 bp, Lawsonia intracellularis
tacttggaccacttgccatagagttgactccttgcaggtcaggccttcgacatataacaagcctatataactaattatagtaatttctggatacaaaaaattattatttattgaggtccaggcatctttccttttaaacgccagacacttgcaagtatagctgcgacagctttatatagctcttcaggaatcatctctcc

SEQ ID NO: 4686 - DNA, 200 bp, Lawsonia intracellularis
aacacctactgctttatacaaagcccgtgccaaagggacattctctctaataggaatattattttctctagcaatctctttaatcttctctgcaacccgatccacacctattgctaataccaaaggcgctggtgcctcaagagcattatatctaagcgcaacagcaatatgttttgggtttgtaacaacaacgtctgctt

SEQ ID NO: 4687 - DNA, 200 bp, Lawsonia intracellularis
taggtacatcttgcatcattctgtttgtcatcatttgcatcattttttggcgctgtttctgctttacaataggatctccttcttgttgttttgactcatcttttatttcttgttttgtcattttcaaattttcttcataactatatctattatatacaagatctgcgactgcaataattgtcataggaattagcgtatat

SEQ ID NO: 4688 - DNA, 200 bp, Lawsonia intracellularis
aaaacaagtactattcctgtattaagcatataatctgccacacctgaaggacttgcataatataatggtaaaaagtttgaaaactctccttttataatcatatatggaacaatacctataacaattacttgaactaaactacgtaaaagtcgaacaagtgtttgttgagaagcaaacattcctttcaacccttttattat

SEQ ID NO: 4689 - DNA, 200 bp, Lawsonia intracellularis
attaaatttactccatttaaatttaaaaacctttgtagtccataatgcaccaacttgtacacgtaatgaaatccatgccgtaacagcaataaaaagtaatattggcatcaataaaatagctatctcttgagcaacataaataaataaagcatatactgactgtgctgtaacctcaaaccgaaatgattctgtaaaaatat

SEQ ID NO: 4690 - DNA, 200 bp, Lawsonia intracellularis
agtagaaaattgtttcaaaatgacgtcccattacgcctgaataaatagcaagccccagcatccctgctgcagtagtcaatgctttagtaacctcttctgatttagggacactcccttcagaacgagcttcctgacgtcgtttcggggttgctttctctgttttactgggatcatcagacatgtatagttcctggtaccat

SEQ ID NO: 4691 - DNA, 200 bp, Lawsonia intracellularis
taaaaatatatggaacctaacatgaggtgaaaactattttccactacccattacagtaagtaagttaaaaaatagtccctctaggcctgcaataaatcgataggtttcttttgataagatagtaaataatagtccaatgaaaaaaaatcctacaccaatttttacaggaaatccaacttccataatatgaatctgaggag

SEQ ID NO: 4692 - DNA, 200 bp, Lawsonia intracellularis
cagctcttgccataagtcctaaagagatctctactaaaaaaagagctgacataactggtgccgcaacatgtaaggcaaaaacaaaaatcatccctgccatattaagaagttcactcaataaaatttctcttacaacaagtcctcctgctggaaccattttaaaagtatatgtaaaagcttttataagaaacaaatggcca

SEQ ID NO: 4693 - DNA, 200 bp, Lawsonia intracellularis
ttaagagcaagaaaaactaatgtagcaaccatataaagaaaatgtgcaataaaacctgtggtgttaccagttaatgggtctgcaagcgtaatcattgtaaaccccatttgtgtagcaagaatttctcccccagcttgaattcctgcaaagaaaaagtttaccgcaagccccaatacaataccaagaaaaacctcgcttat

SEQ ID NO: 4694 - DNA, 200 bp, Lawsonia intracellularis
gattaacaatactagatcgaaaggatgcgctggcatttgtgttcctgaaagagaaagacgcccccaaagaactatagttagaataagagctattgatgcttttaacatattaggaaaaccatcaatagaaaaaaaaggaagcataaataagacaacactaatacgtaaaaatgtaagtaaaaaactaagaaacatactag

SEQ ID NO: 4695 - DNA, 200 bp, Lawsonia intracellularis
gatcaaaattaaataaattcatacttactcactaactataatattaacaattaataatagtaataatcattggcatctctttatttttctaatagattatatggatagttatctatatctaaacaatttagttaattaattactacctactataattaaaaatagtacttatcttaccatagttattggtacagactagc

SEQ ID NO: 4696 - DNA, 200 bp, Lawsonia intracellularis
tacacatgtactaaaaataacaatagcattatttattataacaaaaatactattttttatattattgtaagaaaaatattactaatagttataaaaaataatctatcactttttatttcctatcaaaaattttacttagcactcagtacatcaaagctaaaaaattttataagaatttcttgacaaacatggttattcag

SEQ ID NO: 4697 - DNA, 200 bp, Lawsonia intracellularis
agtatttgcattttcagtacagaatagtattcattaaatgagtactacatcctctctggtcaaattgactaagctgggtggcctgactaggccccttttttttttttatgttattattttgggataccttagctttttatgaacagtgctgcactaatagaaactattacccaacttatatctcctcttattacagcaca

SEQ ID NO: 4698 - DNA, 200 bp, Lawsonia intracellularis
agggctaaaactttggggtattgagttgattaatatacctcaacctattataaaaatttttgtagatacaatagaaacaaacaggttgcatgaaaataatataataaactctaagtctgagcaaataacaatagaacaatgtgcttcactttctcgtctaataggtttaactttagaagttgaagaacttttccctaaca

SEQ ID NO: 4699 - DNA, 200 bp, Lawsonia intracellularis
aatggacacttgaggtctcatccccagggttggaacgctctttttttactatacaacaacttagtaattatattaatcatgacattgatgtcacacttaaagaacagcatcctttgtggccaaaccgcaaaaaattttatggaacgcttattagtataacagacaatacatttatgcttaatttatcattagcacaccgc

SEQ ID NO: 4700 - DNA, 200 bp, Lawsonia intracellularis
aaatctgatgagccagaaaatgttagtattaactggcagcaagtacgtaaagcaacacttgtacaccatttctttcagccaaataaaaaacttggatcaacaaaaggtctcaatggaggcactacatgaatctagaattaaaaaaagctcttgatcaaataagtaaagataaagggcttgatcgtgatatgcttgttgat

SEQ ID NO: 4701 - DNA, 200 bp, Lawsonia intracellularis
acacttgaagatgctgtaagaacttcggttattcggagatatggagataacctagatgttgaggtaagctataatgatgacacaggagaaattgaagtctatcaatttaaaattgtggtggaagaggtaacagatcctatcacacaattgtctattactgaagctaagactcatgatccttctgcacaactagatgacga

SEQ ID NO: 4702 - DNA, 200 bp, Lawsonia intracellularis
aatgggattccgcttaaaagttgaagacttagggcgtatagctgcacagtcagcaaaacaagttattattcaacgaatgcgtgatgcagaacaagaaattatttatgaagaatataaagatcgtattggagaaattgtcagtggtattgtacaacgccgtgataaaggaggttggattataaatcttggccgtacagaag

SEQ ID NO: 4703 - DNA, 200 bp, Lawsonia intracellularis
ctttacttcctaaagatgaacaaatccctaaagaacattataaacgtggagatcgtgttcaaggtctaattatagatgtccgtaaagaaggacgtgggcctcaagttattatttcacgtgcacatcgagactacatggctgctctctttcgccgagaagtccctgaggttgatgatggcacagtacaaattatgggtgtt

SEQ ID NO: 4704 - DNA, 200 bp, Lawsonia intracellularis
gcaagagatcctggaagtcgagcaaaagttactgttctttcacgtgaacgtgatgtagatccagtaggcgcatgtgttggcgttcgtggatctagaatccaaaatatcgtccaagaacttcatggagaacgtattgacatagttatctggagcccggaaataactacatatgcccgtaatgcacttgctcctgctattat

SEQ ID NO: 4705 - DNA, 200 bp, Lawsonia intracellularis
ttcacgtattactgttgatgaaactgaaaaccttcttgaagtaacagttccagatgatcaacttacaagtgctattgggcgtaaaggccaaaatgttaaattagcagcaaagcttctaggatggaaaatcgatattttcactgaaacaaggtataatgaatcaaatgctgttggacgtggacttgaacaagtcgcaagtg

SEQ ID NO: 4706 - DNA, 200 bp, Lawsonia intracellularis
ttgctgagatatctatagaaactttactccactctgggcttaacactcttgagcaaataaatgaaacatctgacgaagaacttattgaaaagttaggtatttctgaatctcaagttaacgacttacgtgcagctgttaactttcttagtacaacagctaccgtcgatagcaataaaaagaaaaaagaagtagaagcagaa

SEQ ID NO: 4707 - DNA, 200 bp, Lawsonia intracellularis
caagcaaaagataacgaaaataacccagctgatacagcagattactagataagatggataaaaagcatattcctattcgaatgtgcaccatatgtaagactcgtactgctaagcatctgctaaaacgatatattcttttccaagaggaaaatatatttcatactgatgaaaaacaatgtatgtttggaagaggatggtat

SEQ ID NO: 4708 - DNA, 200 bp, Lawsonia intracellularis
gtatgctcaaaaaaaaattgctgggaaaaattccggagattccgcgttaatggtcggaaacgtaagggagactagttcatgataaatgataaaattaaagttaaagatcttgcaatagagcttggtgtttcaactaaagatcttttacgtgttttacgagaacttgaaatttctgcaaaaagcacaataagtaatatatc

SEQ ID NO: 4709 - DNA, 200 bp, Lawsonia intracellularis
aatagaagatttacctaaaattcgtgcacaatttaatactcctaatacaaataaggaagaagaacgaagacaaatacaacctggtgtaatattaagacgtaaacgtcaacaaccttctactaaccagacagatattaaacttaatccagttgatactaatgttagtgaatctactatacaaacagaaaatcttatattag

SEQ ID NO: 4710 - DNA, 200 bp, Lawsonia intracellularis
aaaataaaaatacattatcccctcatatagaagaaacaactgaaaaaatacctgctacaacaaatgaaatattatataattctcaaatagcaaaaatagttcaataccctacacctagtgtccctaataaaactttaacaacaacaccacatcaaacaaaaaaaaatcattctgaaaaagatgtgttagagagtcatgac

SEQ ID NO: 4711 - DNA, 200 bp, Lawsonia intracellularis
tcttctaataaaaacatcaaacaatcttcatctcaaaacacagaaaaaactaaccgtaaacctgcggcttctgctatccctgaaggatcttcagctccaagtttactgcctccagtttctgaacaaatacgtcgtttacacgatgaagagactgaaaactcttctagtgaagaaaaaaatgttgatatacaacaaaaaga

SEQ ID NO: 4712 - DNA, 200 bp, Lawsonia intracellularis
aatcccatcaacacaagtgcgggttatttcaaagcctaatattacacagtcccactcttgggatgccaataatacacgttcttctagtgggcaacggactgaaactgaaaaacaatcaaatactgcccctcatactgatagtagagaacatactggtcataataaacgacctgtttcataccaaggacaaaatagaaata

SEQ ID NO: 4713 - DNA, 200 bp, Lawsonia intracellularis
attttattgctactcctgatacaattcctaatgtagaacatgatggacaaaacaagaaaaagcgtcatactagccgtaggtcaacagagtttaaccataaatttcaatataataatgaagatgatgatatatcacgccaaaatcgtggaagaaaacgtcataaacaaaaaacaacatctcaggtaacaacacaaccaata

SEQ ID NO: 4714 - DNA, 200 bp, Lawsonia intracellularis
aaactaacaaaacgtaaaattcgtgtagaagaagctattagagttgctgatatggcccatcaaatgggacttaaagctaatgaaattataaaagtgctctttaaccttggtgtgatggcaacaattaatatgtcattagatattgacacagctactcttgttgctgctgaatttggatatgaagtagagaaaattggatt

SEQ ID NO: 4715 - DNA, 200 bp, Lawsonia intracellularis
tacagaagaagattacttagtagcaacagcacctgaacaatcagaatctctaaaacgtcgacctcctgttgtcaccattatggggcatgttgatcatggaaaaacatcacttcttgatgctattcgaaaaaccaatgtcactggaggtgaagctggaggtattacacaacatattggcgcatatcatgtaacaactaaaa

SEQ ID NO: 4716 - DNA, 200 bp, Lawsonia intracellularis
gtggtgaaattgtttttcttgatacacctggacatgaagcattcactacaatgcgtgctcgtggtgctcaagtcactgacattgttgtgcttgttgttgctgctgatgatggtgtcatggaacaaacccgtgaagcagtcaatcatgcacgggctgcaaatgttcctattatggttgctgtaaataaaatggataaacct

SEQ ID NO: 4717 - DNA, 200 bp, Lawsonia intracellularis
gaagcaaatccagatcgcgtcttacgtgaactttctgacatcggccttgttcctgaagactggggaggtgacacaattgttactaaagtttctgcaaaatcacttgatggtattgacgaacttttagaacttcttgctcttcaaacagatatcctagaacttaaagctaatcctgacaaaccagcaagaggccacattgt

SEQ ID NO: 4718 - DNA, 200 bp, Lawsonia intracellularis
tgaagcaaagcttgataaaggtcgtggtccaatagctacagtccttatccaagaaggaacgctgcatcaaggtgatacttttgtttgtggtgtctttagtggccgagtgcgagctatgtttaatgatcaagggaaaaaagtaaaagacgcaggaccatctatgcctatagaagtccaaggatttgaaggagtacctgaag

SEQ ID NO: 4719 - DNA, 200 bp, Lawsonia intracellularis
caggagaagcttttatttgtttacctgatgaaaaacttgcaagacgcattgcagaaagccgtgcaataaaacagcgagagaaagaacttgccaaagaatctagggtaaccttagaaaccttcctctcaaaaacatctaatgaaaaagaagctcaagtgcttaatttagtagttaagtcagacgttcaaggttcactggaa

SEQ ID NO: 4720 - DNA, 200 bp, Lawsonia intracellularis
gcaattcttgaagcactacgtaaacttagcactgctaaagtacgtattaatattattcatggtggtagtggtgctattactgagtcagacatcttacttgcctcagcatctgatgcaattgttataggttttaatgttcgaccaacagcaaaagtgaaagaagtcgctgagcaagagaatgtagatattcgtttctatga

SEQ ID NO: 4721 - DNA, 200 bp, Lawsonia intracellularis
tattatctataaactagtagaagaaataaaaagtgccatggctggccttcttgcaccaattagtcgtgaagtatatcttggacaagctgatgtacgtgaaatttttaatgttcctaaaataggaaccatagctggaagccatgtttcggatggtaaagttctacgtaatgcaggagtccgactattacgtgaaggagttg

SEQ ID NO: 4722 - DNA, 200 bp, Lawsonia intracellularis
ttgtttatactggtggtattgcctccttacggagatttaaagaagacgttagagaagtccaaaaaggctatgagtgtggtattagtcttgaaaacttcaacgatatcaaacttggtgatgttattgaatcatttgaaacagtggaagaagctgctagcttatagtaaattataattataataaaaaggggaaaagagact

SEQ ID NO: 4723 - DNA, 200 bp, Lawsonia intracellularis
gaagtcttttcccctttttattataattatgttacaaaactgcttttttaataatactaatattattttatattttttagatcttgttctagttatagtatatgactaattaaaaattactaatgatgtgatactctatatttctttgattaaaccaataaaaattttctgtttcctagttaattgttaactgttgctat

SEQ ID NO: 4724 - DNA, 200 bp, Lawsonia intracellularis
ctaacaatatagctatattagctaaaataaaaggggattaatggatcatggctaactatcctccatctgctgaagaaattgcttctcttatacaacgttatgatcgtatagtagtaacttcccacattaaccctgatggtgatgctattggtgcttgtggtgtggtttcctacattcttaaagcacttggaaagcgtttt

SEQ ID NO: 4725 - DNA, 200 bp, Lawsonia intracellularis
attatatataatgcaacaggtattccatatcatctagaatgggttcctttaccaacaaaagttattacaaaactaatggatattccatttaagccagaattatttattattttagactgtggtgatatttggagacttggtagagaattatcttcctgtcttttagaataccagtcaataaatattgaccatcatatagg

SEQ ID NO: 4726 - DNA, 200 bp, Lawsonia intracellularis
aaatccaaattttgggacattagctaattgggttgagccaaaggcagctgccacaggtcaattagttgcagctattgctgaagttattggaatcccacttacaggagagctagctcaatgcttatatctctcaattgtgacagatacaggctcatttgcatatagtaatacaagcccaggagtattacacttagcagcaa

SEQ ID NO: 4727 - DNA, 200 bp, Lawsonia intracellularis
agcttattgaactaggtcttaacccctcccccataagagaacagcttgataatcaatggcctcttgcaaaatttcacctatggggaaaacttatgcaaaaaatacagttagaatatgatgggcaaattgctatttctgctgttaccttaaaaactattacagattttggagctacaaaagaagatttagaaggctttact

SEQ ID NO: 4728 - DNA, 200 bp, Lawsonia intracellularis
gaacaaatacgaaaaataaaaggagtacgtgttgctgctcttgtaagagaagatcctggagaaagttgtaaagtcagtcttcgttcatcaggaacagataatgtacaagctgttgctatacagtttggtggtggtggacactttaatgcagctggagcaacaatccatgaacctatagaaactgcagtaaaacaaatatt

SEQ ID NO: 4729 - DNA, 200 bp, Lawsonia intracellularis
agaagctatacaaaaaattacattttcaacaactgatgtagactagatttcaatgatcctaacaaattactactaaattagtgaataattactataagtattacacaatatttaataactatctatagcttaacattaaaccttgactaatttttaaccagccatctaatgtaacaaaaagcaataatttgaaaggcaaa

SEQ ID NO: 4730 - DNA, 200 bp, Lawsonia intracellularis
gagatagtcattggtgaaaccatcatcatgcccattgcaagcaaaatatttgatacaacaagatctattgcaacaaatggtaagtaaagtaaaaaacctatttgaaaagattttgttaactctgtaattgtaaaagcaggaataataataagtaaattattgcgtgaaatagtttcatgctgatctttaggccaaatacg

SEQ ID NO: 4731 - DNA, 200 bp, Lawsonia intracellularis
cttagccgtcaccattaagcctctaatagtagactcatcagcattacgtattaaaaattcacgtaaaggtggggttgcatcataaagagcttttataacttctagtgctgctggcgatgagggaagtgctgttttaagatacaagtcttccatcttcatatatacaggagccataataaatatacttaaaataattgcta

SEQ ID NO: 4732 - DNA, 200 bp, Lawsonia intracellularis
atccattcattacaattgcaggaggaacctgctgtacacctaatgcattacggatcagtgaagttacaacaactatctttacatatgatgtaaccatcattataacaaacggagctagtccaagtgctcctaaacctaaaatgattattagaggatcaacaccaaacatatatttatagctccttcataaagcctattca

SEQ ID NO: 4733 - DNA, 200 bp, Lawsonia intracellularis
tcaatagttgttgaaaattctaatatacgaataccaataactccattaaaattcattaatacacctgtaccaatagttttatcttcaaaagaaagtataacaggtgaatgaatatctaactccagtgtaaatgtatgtccttctataaaatgctctaactcactcagtgtagtattatattttcctatttcaaaagaaat

SEQ ID NO: 4734 - DNA, 200 bp, Lawsonia intracellularis
aggaacttccagtggatgctctatacttttattccttattgtggactctgaactccatatcactggtgacttctgagagaataacgtcgttccattccacccaagaacctttatgtgtcttccctctacagagcaaaaaatttctttatccaaaaataccaaggataatctatttctcaggataggataatcataaggga

SEQ ID NO: 4735 - DNA, 200 bp, Lawsonia intracellularis
ataaaacatcacctggtgtaagttgcattaactctttaattgttaataagctatatccaactcttatattcatttctaagggtagtgctaatggcattacattattctttggcaatgtctgtaaatatattaaaaaattttttgcactgtttccttctggaatataaatcctgagaggaatatttgatctcattagtccc

SEQ ID NO: 4736 - DNA, 200 bp, Lawsonia intracellularis
gtatatgatttattctcttctaactttgtagaatcaaatattaatgtaatcacacatccaaactgataatctactaatggttcatagaaaaaacctaaaaatattacaggtacatgtaatatattctgtaacttatgctttaatggggcaaataaagcttctagtataggtaaaataacaacatctgataatggactatc

SEQ ID NO: 4737 - DNA, 200 bp, Lawsonia intracellularis
atatcttacagaagataaagctggatgtaaccatagaatacttaaatcttctaatgctatttgtatcaaatcattttcacattggaatcgtagaaagactttttcagcaacatataaagaaggttgccctaagtgaacaatgcaacttgtttcaccaagaggaattatccatggtggtgtgagagttgtaacttcattca

SEQ ID NO: 4738 - DNA, 200 bp, Lawsonia intracellularis
gtaacctcattgctaattttgacaacaaaggaggtgtaaatagttgtatatctccctgtgaccccagattagacattattactactccgtaacaggaataaaactaatacattaaaagttattcatctatatcttcttgttcttcttcacgttcaggcattttgaagtcttcaagttcaacttcttcacgttgttgagca

SEQ ID NO: 4739 - DNA, 200 bp, Lawsonia intracellularis
agaattttttcttctgcttcccataactttttatgttctgcgagttttgctgtctgcttttttaattctgtaagattcttaatagctctctcttttgcttctatacaagcttcaacataatcttttgccttatctacaagcttatacttttctttgacattatctaataaaatacctgtctttacttttaataattctaa

SEQ ID NO: 4740 - DNA, 200 bp, Lawsonia intracellularis
ttccttaaaaagaactaatgagcctataatttcactatagtatctattaatttcctgttggcaccattcttcataatttttacagtcttcttcagctttttgtaaatctttccttgcctcaacaagtgcattttcagctcttagtactgcctgttgtgccaactcttccttatgctctcggacagaaagaagcggagcta

SEQ ID NO: 4741 - DNA, 200 bp, Lawsonia intracellularis
atggatatttggacattcaatacattccttatcattcttaagccaccgctttttttaaagcctgaagtgtttgctcaaaagtacttttttcatctaggccctgctgtaaaaaagcattaatccctttattatgttttatagcatcatccgcagcaggatcattacctgctttatattctcctatctggactaaaagctca

SEQ ID NO: 4742 - DNA, 200 bp, Lawsonia intracellularis
acttctgcatatttagcaagatatttccttaatttccctgcattttctttatgttcctttgtaactatagcattcataacacgacttacactagctaagacatcaacagcaggatagtgatttgctgcagctaacttccttgataaaataatatgaccatctagaatagaacgtgtttcgtcagcaattggctctgtcat

SEQ ID NO: 4743 - DNA, 200 bp, Lawsonia intracellularis
atcatcaccttcgacaaggacagtatataatgctgtaatagaacctttatctgagtttcctgctcgctccataagttttggtaatgaagaaaagacagaaggtggaaacccacgacgtgttggaggttctccagatgcaaggcctatttcacgtaatgcacgaccaaaacgtgtgacagaatccataagtaataaaactt

SEQ ID NO: 4744 - DNA, 200 bp, Lawsonia intracellularis
tctttccttgatctctaaaatattcagcaattgcagttgctgtataagctgatttaagtcgctccatagaagaacgatcagacgtagatacaacaagtacagaacgctttaaaccttctgctccaagatcatgttcaataaattcgcgtacttctcgaccacgttcaccaatcaatgctaaaatacaaacatcagcagtt

SEQ ID NO: 4745 - DNA, 200 bp, Lawsonia intracellularis
gtgcctttaataatacttgataaaagtgtacttttacctccaccagctgcagcaaaaatacccatcctttggccctcaccacaagttaatattccatctaatacacgaagacctaatgaaattggcttctcaataattcgacgtaacattggattaggaggatctgcatatacaggatagtatgtccgtaaacgtaatgg

SEQ ID NO: 4746 - DNA, 200 bp, Lawsonia intracellularis
agctttcccatctataggttctccaagtccatttaatacacgaccaagtaactctcttcccactggaatagcatgaaccattcctgtaggaattacttctgttgagggagaaataccttggagatctcctaagggtgtaagtaaagctacatgttttacaaaaccaactacttcagcctgtaaggtccaattatcccatg

SEQ ID NO: 4747 - DNA, 200 bp, Lawsonia intracellularis
ggttacgtagttcacataattcaccaatcttaacgcctgggacaactgcacgaattattgtaccaataacttgttcaacccttcctctaacttctacaggacttgtattctgcacagcctcttcaaggagtgaagcaatatattcaagcgccataaagtatcctttctatcaacttaatatttaattttagaatggaaag

SEQ ID NO: 4748 - DNA, 200 bp, Lawsonia intracellularis
cactttccaaagctttaagctgtacatctaaacttgcatctacaacaccatattctgtttcaacaagacatgaacctggttctaacctggcatcaacaacaatattaagaaatccaccttttgttgactttaatgtatcagaaaacttttttgtaatagctttttcgtcagctgtagatacacggataactaactctttt

SEQ ID NO: 4749 - DNA, 200 bp, Lawsonia intracellularis
tgagatttaacattctttagcgctcgttgtgcaatacgtataatacgttcagcgggatccatttcattaagaacttttttaactgtattcatcacaatctgtacaaggtcatcttcaataccttcaataaattcaacagataataatactgtttctaacacatgctctttgttctcacgaagtccttcatttttgccatc

SEQ ID NO: 4750 - DNA, 200 bp, Lawsonia intracellularis
ttcatagccatcttttcctttttgcttgtatacttcttctgcatgaagttttagttcattaatacgcttagtaacagcttctgatagttcactggaggagataagagaagaaaaaaagtctgcctttaataaaggaattctttctgtcaactctggtaatgatgatgttagtcgaaaataggtgcccattgtggtgcaac

SEQ ID NO: 4751 - DNA, 200 bp, Lawsonia intracellularis
ctctcgaagaagtattttctttagcccatcccaaacccctttaataacaggtgaaggataatcctgagacagtacagcactgtcttctgtggaaaaaacaaaattaagctgtgaaaaaaatatagattgaagaacactaggccatgaagatgcacaaatctctaaagccatacgaccatcccaatggatacgggttgtta

SEQ ID NO: 4752 - DNA, 200 bp, Lawsonia intracellularis
atggaatggaatgactctgtgctaaaaaaaatctgcgtactgcaccgacttggtatctaccacgcaataagctatattgataaagatcttgcccaaggatctgctgtaattggaggacttcatcccttcttaaaacttttgcaatttcatctgcattaatggctgcaccaaaaactagttgaagacgccttactgtttct

SEQ ID NO: 4753 - DNA, 200 bp, Lawsonia intracellularis
ggttcaagtaatgcaatccttcttgtttcttccataaaatcccaaaaacaatattctgtttccattagtcgctctttctttaaagcaattcctcgtaaagcaagcttttgtataaaagaattatcaaatccaggagtagcatctgtaaaagaagccatttcttcagctgtctggatcattacattatataataaattaca

SEQ ID NO: 4754 - DNA, 200 bp, Lawsonia intracellularis
attaaattctattattgcctcaaataattgaggtttattaatgattatctcaagaaaaaatactttatccattattgctcttctggcttaatagtttgttctcctgatatagatccatcattatcaatttttttagcaatgggtatatctttttgaaataacactaaaccaatacaaaaaaatatcccaaatataatggc

SEQ ID NO: 4755 - DNA, 200 bp, Lawsonia intracellularis
taaaaagataattcccattccaataagaaaataaggactacctcgttctgggaaaagtgatatacctaaaaaggttgaagagcccatagagggaatagtcaaaggttcttgtacaggaagtaacatcacagaggtacgatcatattcaagatcaggaagacttttagccgcaacttcacgaatactaggaagcatattta

SEQ ID NO: 4756 - DNA, 200 bp, Lawsonia intracellularis
ctacaggcgaatcaggcgtatgccttataaaaatacccatagatggaaggattttagaatcaacagcttgatctgtatagcctgggaccacatgaactcttgttgttaatactccatcaatacgagaaaaagtatttgcaagctcttgagatatagcataggccatccgtgcacgttcttcagattgagaacttatcata

SEQ ID NO: 4757 - DNA, 200 bp, Lawsonia intracellularis
ccttggcctgaaaagacttccccaaggctaacatagttttctctaggtaatgcattcttttttaaaatctctaaagcacttatcaactgttcttctgccacaagtaaagaaaatccttctttaccacctggagatttttctacatcaatccccctatagattaatgtagcaaccatttcatttacctgatcttccgtaag

SEQ ID NO: 4758 - DNA, 200 bp, Lawsonia intracellularis
ccccttataaacttctaacttacaccctgatataaaaataatgctaaaaaaaataataaataacagtaagatattgtcccacttttttaatggatatacattgctatccgttgctttaactatatatctgtctgttaaaagcatctatactcaccaattatgactgtaactgtattttcattacctcaagtaaatctacg

SEQ ID NO: 4759 - DNA, 200 bp, Lawsonia intracellularis
gcaaagacactggctgcaccatcagtggctgctactttctcaaataacagcgatgattgatccccacgccctgtgaacatataagtaattcctaaaaatacttgtgcatcaggatcatctggaactttttctaaatatttcgtgaggatttcttctgcttcactaaactcatcgataacaatatggctcagtgcttgtcc

SEQ ID NO: 4760 - DNA, 200 bp, Lawsonia intracellularis
tattaaagctggtgggaaacctggttttaatgccaaaacaccatcataaattttacgtgccacaccaactaatccataatggcaagctgtattagctgtatcaagcagcctttttacttgatattcagaaagcatatttccctcttctatctttaaaaatagataataaattttgagttaatcataaccatataaaatac

SEQ ID NO: 4761 - DNA, 200 bp, Lawsonia intracellularis
atacaatttatcctgtcctctgtgctaaacttttgattgtatctattgaacttttatttattgaagaagttacttccagtaatgagttatactgacctagctcaaaactaactagcatcatatcttcaggattaaggttttgcccttgaattaattgatctaattttgcttgtaatgtattacccctagtatcaatcttt

SEQ ID NO: 4762 - DNA, 200 bp, Lawsonia intracellularis
tgtagtgcatcagctaaaaaatctcctatattaacggccattatcacacctcctttacctatcttagaatatagaaaatatcaggatggtatataattcaattttaattgacctcatttaaagctatggtattagcataccacttccatatggactactaaatgaatttgattgatttttatatttatctatttgttctt

SEQ ID NO: 4763 - DNA, 200 bp, Lawsonia intracellularis
tccaccaatacatatcacttgcaaagcttttcatataatcagggaaaagttctatctgttcatttttaactactaagtgtaattccaaattgttttctttaatggaaacaatagatcttttcttttttgctacaccaatagcaattcttgcacactctttaataatagtatttgttatagtatcattattttctacagaa

SEQ ID NO: 4764 - DNA, 200 bp, Lawsonia intracellularis
aaaagttttccaaaaaatatagaaatattactattaggtgaaaataaatctatatctatatcttgatccaaactaaaatgataactaccagtacttgttggtagcaacggttcaagttcaaacgcactagtaatagtatcaacgatatcttgcagagtcatattattacctattaatagagttaactaacctaacgtcaa

SEQ ID NO: 4765 - DNA, 200 bp, Lawsonia intracellularis
attatgaaaagactaaaactttatatgttactctcattatatatcatagcctaactacaattagagttttacaactcctcttctagaaactatccttttcctttttgtagatatatcttcttcttttttctttgttacaggaatatctgaaaatttttcttgaattttttgtttttcttcttctaaagttctaataactt

SEQ ID NO: 4766 - DNA, 200 bp, Lawsonia intracellularis
ctggaggaagttgtttaacaaactcttcaagtttttcttcagtaacaccaagagcttcaaggcgttcatcatattctttattaagcctctctaactcttgctttaattctaaatattgccgttcttgtgcttcaagatctttcttggtgaatgccatttgaaaactccttcttgggaaataccataaaagtattgcaata

SEQ ID NO: 4767 - DNA, 200 bp, Lawsonia intracellularis
taaataaaaaataaaaaattttatattactgtgaaaaacagtataactttctttctattataaacaataaaataactatattctattgaaaaatatctcaaaaaaatacaaaatataatttgtcattgtaatatacaataatatttttactataaaaaagtatatgaattatatattataatagataaaaaataacaatt

SEQ ID NO: 4768 - DNA, 200 bp, Lawsonia intracellularis
aaaatttactgaggagattatgataacacatgaaattgaagagtttggtcgtcgtatgggaatgtcagacttagaactttctcaagatggtatcattgcatttgaagttgaagacctaggatctttacatatagagcaagatgaagaaaatgaagaactttttatatatttagcaacacctgtaccaccatataataatg

SEQ ID NO: 4769 - DNA, 200 bp, Lawsonia intracellularis
atattcctaaaaaagttcttgaactatgtagttataagcatgcacatccatttatactacatggtggtatacataatgacaacgttatatttctttctagaattagctatcgtgatgtaaaagcatcaactattgaaaatacaacacaatttcttataagtattacacaaaaagtgttgtaatatatatatataataaga

SEQ ID NO: 4770 - DNA, 200 bp, Lawsonia intracellularis
tatataattgtatagtttttttatgatgtattataaaaataaattttatatacctttttatatatttatatataattactaaatatatattatataactatataagtgcattatagtaaagtttttactaagatagagagagtttaaaagtattatatttggatgaaaagattatctgaggggtaccatgctgctcacgt

SEQ ID NO: 4771 - DNA, 200 bp, Lawsonia intracellularis
ccgaacagcgacaaactttatatatcttaggatatctttacatacgcatgggtctaaatgactcagcagaaagactttttaaaacaatacttagtctctttcctgaagataaatggtctcatcgaagccttgcagtgatcgccatgaggaaaggtgatagtatttcttgcttagcacatatttataaagcagtagcaggg

SEQ ID NO: 4772 - DNA, 200 bp, Lawsonia intracellularis
gaacatagtatagtaaagcatgctccactacttcttttacaagcacaagcattatggaatcttggacgttattctgaatcaaggacatctatccaaaactatattaaaattagaggaagtcgaacatgagcttattcgctaaagctcaatcgactgtaggtgttattacacgaaataatgacatcactatggtcctttta

SEQ ID NO: 4773 - DNA, 200 bp, Lawsonia intracellularis
ttagtgactgtcatagcattaatgattatcccattacctactcctttagtggatacactgattggtattaacatgggactttcatttcttattgtaatgatgtgtatgtatgttaagacagttttagatttttctgtttttcccactatgctcctttttacaaccctgttcagagttggtttaaatatcacaacgacaag

SEQ ID NO: 4774 - DNA, 200 bp, Lawsonia intracellularis
acttattttactccaagcagatgctggagaaatcatttttatttttggtgaatttgccttaggtggaaactttgttgttggagcagttgtctttgtcattctaacaattgttcagttccttgttattgcaaaaggagctgaacgtgttgccgaagttggtgcacgctttacccttgatgctatgccaggaaaacagatgt

SEQ ID NO: 4775 - DNA, 200 bp, Lawsonia intracellularis
ctattgatgccgacatgcgcgcaggcgttattgacatggaagaagcccaaaaacgtcgtgcacgaataaatcaagaaagccaaatgtatggagctatggacggtgctatgaaatttgttaaaggtgatagcatcgcaggaatgataattgctgttgttaatattgttggaggtaccattattggggtcacacaacatgga

SEQ ID NO: 4776 - DNA, 200 bp, Lawsonia intracellularis
atggctgcctctgatgccttacatgtttatggtattctgaccattggtgatggtttagtctcacaaattccatctctgttaatctccattgcagcagggattctgattactcgtactggtgactcagctgaaaatgttggttctcaaattggtgaacaaatatttaatcagcctaaagctcttttaatggcaggtggagt

SEQ ID NO: 4777 - DNA, 200 bp, Lawsonia intracellularis
tgtatttcttattgcactagttccaggttttccaaaaattcaactttttgccatttcagctactcttgcaggtattgggtatacactaaaacttattatgactaaccctgcacctaaaaatgcaaaacaaagtatagcaaaaacattagaacctacaacatcaccttcaaaaaaatcttctactgaacagaaggaatcaa

SEQ ID NO: 4778 - DNA, 200 bp, Lawsonia intracellularis
aagaagagttttcaccaactgtacctattatattagatatatctcaacaaatgagtgaagagttagattatgattcactcaatgatgaacttataacattacgtcgtgttctatactttgatcttggtgtaccattccctggcattaatcttcgcatctcatcaaagctacatgaccttacttattccttaatgattaat

SEQ ID NO: 4779 - DNA, 200 bp, Lawsonia intracellularis
gagattcctataaccaaaggaacacttgaaaaaggtatggtcttagcaagggatacaaaagaaaatttggcaatgcttggagtggaacctgaagaaaaagaaaaatttcttccagatgttgagtctctttgggttccagactctaaaaaagcattgcttgaacgggcaggaataacatgtatgacacatagtcgcattct

SEQ ID NO: 4780 - DNA, 200 bp, Lawsonia intracellularis
tgcttaccacttatcccttgtcctttcacgccatgcttcaaactttctgggcatgcaagaaacaaaatatctcttggataaaatggaagaacgtgctcctgatttggttagagaaacaactcgattattacctgtacaaagaattgctgaaattttccaacgtcttgtacaagaacaaatttctatacgtgacttaagaa

SEQ ID NO: 4781 - DNA, 200 bp, Lawsonia intracellularis
gtatccttgaggctcttattgagtggagccctaaagaaaaagatactgttatgctcacagaatatgtccgaagtgcgttaaaacgtcaaataagttacatgtactctaaaggtcaaaacatgctacctgctgttcttcttgatccaaacgtagaagaaactattagaaaatctgtaagacaaacttctgctggggccttc

SEQ ID NO: 4782 - DNA, 200 bp, Lawsonia intracellularis
cttgcattagatccagaaacaacacaaatatttatggcatcccttaaagagtttgcatcagagaccaatctaacctatacccaaaaacctgttttaatcacttcaatggatattcgtcggtatgtacgtagactcatagagggagattattacaaccttcctgtagtgtcataccaagaacttacaccagaaatttctgt

SEQ ID NO: 4783 - DNA, 200 bp, Lawsonia intracellularis
acaacctgttggaagaatacgtttctaaatacagagagtagtcatatggaaacgacaactatgacatatacagcaaaagcactttatttagtgcttgtgctatctatgccacctattcttgttgcatcacttgttggactttttgttagtttaattcaagcaattacacaacttcaagaacaaacacttgcatttggtat

SEQ ID NO: 4784 - DNA, 200 bp, Lawsonia intracellularis
aaaacttcttgctgttgtacttactcttttttttatgggtggatggttaacaggagaactctatagatatgctgaagaaattttcaatcgttttcatatcatgtaactattgcaataactatagttgacacacaaaattttattaggactattatgaattatgatcaaacaataggtgcacttggtgtatatgatcactt

SEQ ID NO: 4785 - DNA, 200 bp, Lawsonia intracellularis
tatagcattcttaataggaacaccaaggctcttcatgattattcaagttgttcccttcatgggcaataatattgtaacaggtcaacttagagttgttgttgttttctcattttatctattattatcacctgcacttgttgcacaactaccacatatacctgaagtagatccctcactccttcctcgtattttagcaatag

SEQ ID NO: 4786 - DNA, 200 bp, Lawsonia intracellularis
taataaaagagggctttataggattttttttaggataccttggaagtatggttttctggatgattgaaagcgtaggactctttattgataaccaaagaggagctgccatggcagcacagacagatcctttgtcagggagccaaacttctcctcttggttcttttctatttcaatgtcttgtgtatatcttttttaccagt

SEQ ID NO: 4787 - DNA, 200 bp, Lawsonia intracellularis
ggggcttttattacctttttaacacttatatacaaaacatatgaattctggccaccacatgaatttatccctatgagttggaaaatgcgtcttcctgaattaataataaaacaagtagattggcttatggcttatacaatgctacttgcaggtcctattgctgtagcatgtttacttacagatgtttcattaggacttgt

SEQ ID NO: 4788 - DNA, 200 bp, Lawsonia intracellularis
taatcgctttgcatcccaacttaacgtttatgtccttgctatgcctataaaaagtgctgttgcggcttttctccttattttctatttcaaattacttctagaaaaagctacatttttatttaaaccttttgaaactgttctatttcaaattaagagtctcatacaatgagtggagatagcggagataaaacagaaccacc

SEQ ID NO: 4789 - DNA, 200 bp, Lawsonia intracellularis
aaccccgaaaaagttgcgtgaagcaagagagcaaggtgacgttgctaaaagtcaagatgtcgctgctgctatgacaatgtttggtgcttcattatattttattggaatgtggcaagatgtctttagcaatttgcttaatttaattgaattaccaacaaaatttatacacctaccatttgaagaagcactccctgctacaa

SEQ ID NO: 4790 - DNA, 200 bp, Lawsonia intracellularis
taagcggaattgcatcaatagcttttagtatacttatacctatcattgctactcttatgtttttagctgttgctgcagatttaatgcaaataggcgtattattctctgtcaaatctgctatccctaaacttgataatcttaatcctaagaagtggttttcaaaagttttttctataaaaaatcttggagaatttgtaaaa

SEQ ID NO: 4791 - DNA, 200 bp, Lawsonia intracellularis
aatattcttaaagttagtgtattaactattactgtatggattattttatcaaattatatcaaagaattatttgcaatagcttcaggaaatatttggagtttatggtacatattaggatctgttttaagggatctaacccttagcgtttctatggttttttctgtcattgcatgtatcgatttcatgtttcaaaaatggca

SEQ ID NO: 4792 - DNA, 200 bp, Lawsonia intracellularis
atacaataaacgtcaaatgatgagtaaacaagagatcaagcaagaatataaagatatggaaggtgatcctcttataaaaggaaaaagaaaacaacttcatcaagaaatggctatgcaaaaccctgtaaacaaagtaagaaaagccaaagttgttgtagttaatcctatccactatgctattgccattgactatgaaaaag

SEQ ID NO: 4793 - DNA, 200 bp, Lawsonia intracellularis
gaaggacactccttcctgtaattctagcaaaaggtgaaggattattagcacaacgtatggtagctgtagcacaagaagaaggtattcctgttatgcaaaacattccactagctcatagcctttttatggatggaattgaagattcctatatccctagaaatcttattgcaccagttgctgaggttttacgctgggtaaac

SEQ ID NO: 4794 - DNA, 200 bp, Lawsonia intracellularis
tctttaaataaaaatatgatacataaacctatatctaatgatacttaaataacaaaaattttattatgtaatacaaaacataactattttattaataataattttattaataatagactaagctcctcactctaaaactatctgaaatatagttacgatcatgtgctatagtattagtgctattaaagtgaactatactt

SEQ ID NO: 4795 - DNA, 200 bp, Lawsonia intracellularis
ttttactaaaaaattactatgttagagcttaatggagttactgaagcaatggccccaaatcttgagctttatggtactgaacgttttgaaaaaacgcttgatatgaacaggaagaagtcattaaagggattaatagcagcagtaaatcaaacaataatagaacatagaggagaagctgaacaatctgacgatataacgat

SEQ ID NO: 4796 - DNA, 200 bp, Lawsonia intracellularis
gttagcatttatgtataagtagagagagttgttgtgtgtgtgtgtgtgtgtgtgtagagaggtgtttgttaaaaggaaaggctctctgatagagagccttttttataaaaaagtcttggcatcgacctactttcccacacataaatatgcagtatcatcggcgatggagggcttaactgccgagttcgggatggtatcgg

SEQ ID NO: 4797 - DNA, 200 bp, Lawsonia intracellularis
gtgtaccccctcctccatggacaccaagacaaaatatgtataggggatgaagaaagtaaaatagagcaagcctcacggactattagtactggtcagctgaatacgtcaccgtacttacacctccagcctatcaaccaggtagtctacctgggtcctttagcctctttcgaggggggagaactaatcttgaggcgggcttc

SEQ ID NO: 4798 - DNA, 200 bp, Lawsonia intracellularis
ccgcttagatgctttcagcggttatcccttccacacatagctactctgctatgccactggcgtgacaacagaaccaccagcggtgcgtccatcccggtcctctcgtactagggaaagaccctctcaattctccttcgtccacagaagataaggaccaaactgtctcacgacgttttaaacccagctcgcgtaccacttta

SEQ ID NO: 4799 - DNA, 200 bp, Lawsonia intracellularis
aacggcgaacagccgtacccttgggacctgcttcagccccaggatgtgatgagccgacatcgaggtgccaaaccgcatcgtcgatatgaactcttggatgcgatcagcctgttatccccggcgtaccttttatccaatgagcgatggcccttccattcgggaccaccggatcactaacgccaactttcgttcctgctcga

SEQ ID NO: 4800 - DNA, 200 bp, Lawsonia intracellularis
catgtctgtcttgcagtcaagctcccttatgtgtttgcactcaacgcctggtttccgatcaggctgagggaacctttgcatgcctccgttacattttaggaggcgaccgccccagtcaaactacccaccagacactgtctcctgccaggctaactggtcagggttaggatcttaaacgtgtaagggtggtatttcaaggt

SEQ ID NO: 4801 - DNA, 200 bp, Lawsonia intracellularis
tgcctccgcctatactggcgtataggtttcactggctcccacctatcctacacatacaagcccaaaatccaatgtcaagctatagtaaaggtgcacagggtcttcctgtctttctgcggatacacggcattttcaccgcgacttcaatttcaccgagtctctggccgagacagtgtggagatcgttacgccattcgtgca

SEQ ID NO: 4802 - DNA, 200 bp, Lawsonia intracellularis
ggtcggaacttacccgacaaggaatttcgctaccttaggaccgttatagttacggccgccgtttactggggcttcaatttggtgctttgcttgcgctaacacctccttttaaccttccagcaccgggcaggcgtcagtccctatacgtcgtcttttggactttgcagagacctatgtttttagtaaacagtcgccaccac

SEQ ID NO: 4803 - DNA, 200 bp, Lawsonia intracellularis
caattcactgcggcttccaggagctccaatagttttattttcacccccaaaagcgccccttcttccgaagttacagggccattttgccgagttccttggccagagttctctcgagcgccttggatttctcatcctacccacctgagttggtttgcggtacggtttgatacatatatgcttagaagcttttcttggcagta

SEQ ID NO: 4804 - DNA, 200 bp, Lawsonia intracellularis
taggctcaacagcttcagaacttacgttcacgggttcgcatctcgaatacatctggtggatttgcctgccagacagttctacatgcttgcaccaggacttccaacacctggcctgcctaccttcctgcgtccctccatcacgctatgtatcaagtacaggaatattaacctgtttcccatcagctacggctttcgccctt

SEQ ID NO: 4805 - DNA, 200 bp, Lawsonia intracellularis
accttagggaccgactaaccctgggaagattacctttacccaggaaacctcgggttttcggcgaataggtttttcacctattttatcgttactcatgtcagcataatcacttctctactgtccacaaaacctctcgattttgcttcagcctatagagaacgctcccctacccattgccttacggcaatgccaaagcttcg

SEQ ID NO: 4806 - DNA, 200 bp, Lawsonia intracellularis
gtaccatacttagccccgttacattttcggcgcagaatcattagaccagtgagctattacgctttctttaaacgatggctgcttctaagccaacgtcctggctgtatatacaactccaccacctttcccactgagtatggatttggagaccttagctgttggtctgggctctttccctctcgacgacggaccttcgcacc

SEQ ID NO: 4807 - DNA, 200 bp, Lawsonia intracellularis
cgccgtctgactcctgggatacaattagatggcattcagagtttgatagagtttggtaatctggtaggacccctagctctttcagtgctttacctccattaatcaatcccaaggctatacctcaatatatttcggggagaaccagctatcaccaggtttgattgacctttcacccctatccacaagtcatccaaaacgtt

SEQ ID NO: 4808 - DNA, 200 bp, Lawsonia intracellularis
ttcagccgttactggttcggtcctccacaaggctttacccttgcttcaacctgctcatggatagatcacctggtttcgggtctaatccaacgtactgacggcctattcagcctcgctttcactacggctacacttacgcttaaccttgcacgttagattaactcgctgactcattatgcaaaaggcatgtggtcacatct

SEQ ID NO: 4809 - DNA, 200 bp, Lawsonia intracellularis
taaagatgctcccacagcttgtaggcaactggtttcagattctatttcactccccttacaggggttcttttcacctttccctcacggtacttgttcactatcggtcgctgaggagtacttagccttggaggatgggccccccagattcccacaaggttacacgtgcctcgcagtactcaggtaccgactatgtctttttc

SEQ ID NO: 4810 - DNA, 200 bp, Lawsonia intracellularis
aggttcagatacgaggctatcactctctatggcggaactttccagttctcttctcctgcttactccagaatcacgtatgtcggccctacaaccccaaccagtcgaaactgtttggtttaggctcttcccggttcgctcgccactactacgggagtctcttttgatttcctttcctccaggtactgagatgtttcacttcc

SEQ ID NO: 4811 - DNA, 200 bp, Lawsonia intracellularis
ctgggttagcttcattgacctatgtattcagtcaatgatactgggacattactcccagtgggtttccccattcagacatcaccggatcataggatgtttagcgcctccccgatgcttatcgcagcttaccacgtctttcttcgcctctcagcgccaaggcatccaccttgttgcccttattatcttgtctcttaagaact

SEQ ID NO: 4812 - DNA, 200 bp, Lawsonia intracellularis
tcctttcattccctattcaattgttaaagagcctgaacatttatcatgttcccaggtctctcctggatgacttccacaagtatcttgcgaaacttaccagacaagaccttccttcttctggtggaggtgaagggatttgaacccatgaccctctgcgtgcaaagcagatgctctcccaactgagctacacccccacgcct

SEQ ID NO: 4813 - DNA, 200 bp, Lawsonia intracellularis
ttcaacctctttcttccgtcttaccttgttgttctagtatctttcaactttagacacaccttatggtgggcctggaaagacttgaactttcgacctcacgcttatcaggcgtgcgctctaaccacctgagctacaggcccttactgccttcttctttgctctttgcaagtaaagagtgaatgggaattttcttcgttaaa

SEQ ID NO: 4814 - DNA, 200 bp, Lawsonia intracellularis
ggaggtgatccagccgcaggttcccctacggctaccttgttacgacttcaccccaatcattagccctaccgtagacgactgcctcgattgctcgttagctcgccggctttgggtaaaaccaactttcgtggtgtgacgggcggtgtgtacaaggcccgggaacgcattcacccgagcatgctgatctcggattactagcg

SEQ ID NO: 4815 - DNA, 200 bp, Lawsonia intracellularis
attccgacttcatggagtcgagttgcagactccaatccggactgagatgcattttttgggattggctccaccttgcggtcttgctgccctttgtgtgcaccattgtagtacgtgtgtagccccaggcgtaagggccatgatgacttgacgtcgtccccaccttcctccccgttaaccggagcagtctctctagagtgccc

SEQ ID NO: 4816 - DNA, 200 bp, Lawsonia intracellularis
aactttacttgatggcaactaaagataagggttgcgctcgttgcgggacttaacccaacacctcacggcacgagctgacgacagccatgcagcacctgtcttgaggctccccgaaaggcacctcttaatctcttaagagtccctcagatgtcaagcctgggtaaggttcttcgcgttgcatcgaattaaaccacatactc

SEQ ID NO: 4817 - DNA, 200 bp, Lawsonia intracellularis
caccgcttgtgcgggcccccgtcaatttctttgagtttcagccttgcgaccgtactccccaggcggggtgcttaacgcgttagctacggcaccgaagataactccccagcacctagcacccatcgtttacagcgtggactaccagggtatctaatcctgtttgctccccacgctttcgcacctcagtgtcagttatcgtc

SEQ ID NO: 4818 - DNA, 200 bp, Lawsonia intracellularis
caggtggccgccttcgccactggtgttcctccagatatctacggatttcacccctacacctggaattccgccaccctctccgatactcaagttatacagtatcaaaggctgttccaccgttaagcggtgggctttcacccctgacttatataaccacctacgcgcgctttacgcccagtaattccgattaacgcttgcac

SEQ ID NO: 4819 - DNA, 200 bp, Lawsonia intracellularis
cctccgtattaccgcggctgctggcacggagttagccggtgcttcctctgggggtaccgtcaaaaatagaccctattagagcccatccatttcttcccccctgacagaggtttacgatccaaagaccttcatccctcacgcggcgtcgctgcgtcaggctttcgcccattgcgcaatattccccactgctgcctcccgta

SEQ ID NO: 4820 - DNA, 200 bp, Lawsonia intracellularis
ggagtctggaccgtgttccagttccagtgtggccgattatcctcttagatcggctacccatcatcgccttggtgagcatttacctcaccaactagctaatgggacgcggactcatcttcaagcgatagcttacatacagaggctaccctttgcactacaactttttaccataatggttatccggtattagcgaccgtttc

SEQ ID NO: 4821 - DNA, 200 bp, Lawsonia intracellularis
cagccgttatccccgtctcgaaggtagattatccacgcgttactcacccgtgcgccactttactcatcccgaaggactttcacgttcgacttgcatgtgttaagcacgccgccagcgttcaatctgagccagaatcaaactctccagtttaattcacaatttctatatagtcacttccgtgactcttaactcaaagtctt

SEQ ID NO: 4822 - DNA, 200 bp, Lawsonia intracellularis
gttccctctcactcttcacttgtcaaagaacaactctgctaatacttctttaaaatatcttccagcagagagggaggtctacacctataacgaccaatctgtcaacaacttttttaaataaaaaaacatcaatattcactaaccactttcaattacagtattaaaaaatatttttaaattttgaagtacaaacttactat

SEQ ID NO: 4823 - DNA, 200 bp, Lawsonia intracellularis
taagaatatcatttcaaaaatatagttaatcagtcttccataaaaatataatgcatttgatatgtattttactacaatatcataattaagcacttgctcaaaaaagcagaggagagtatttagtactgtaagactgtttttacattaactagagttggttatacttaacttcctagcacctatagcttatatagaaggat

SEQ ID NO: 4824 - DNA, 200 bp, Lawsonia intracellularis
aaatagatgagaggatactatacctataactattcttttatagtataatattatcatactgactaaactagtcttaaaaaatgtaactacttttactaatcaaaaaatataacacatgcgttactttaattttcataatcttgctagacaacttattatatctcctaagttttttcttatcatttgctcatttatttatt

SEQ ID NO: 4825 - DNA, 200 bp, Lawsonia intracellularis
taacctatattttgcttctacccttagttcatgctaataatgatacaaataataaccttaatacagatttaactttttctcctgaagaaacatcaactggtattataacagatagagtaaccccattattagattggattttagatcaatcaggtcaacttacaattaatcaagttctctctccagaagtacaacgaact

SEQ ID NO: 4826 - DNA, 200 bp, Lawsonia intracellularis
ttctcatcatttctatttactgaccttcctaagcaggaaggaactttttggtttcgttttgtaattgactcaacaaacaggctttcttcatctgactttatacttgatttaagtaaacgtactcctactcagttccctgaaccaacacaagtatgggttgtgtctatgggctctgggaaagcaacactaattaatccaat

SEQ ID NO: 4827 - DNA, 200 bp, Lawsonia intracellularis
taaagataatagttatccaatcaaatactcaggagctgaagtccttgaagtatatataaagctacctggtgcaccaggagttggttttactcctgttctctggacaaaaaaaagcttttcgaccttttatgcttctatgcatgttgctatattatttttgcttgcaattactattgctatctgtcttattcgagcattta

SEQ ID NO: 4828 - DNA, 200 bp, Lawsonia intracellularis
cagaaaaacaagaatggagaatttgggctgcactttattcaggatctattctaataagcacactatggggacttcctcctacccctaaggggatacttactatttgggatatacctggtttactagctccaggaatagcactatttattctaccacacataggtagacgcctgatgaacacaaggcaagtatcacctcat

SEQ ID NO: 4829 - DNA, 200 bp, Lawsonia intracellularis
attgatatacaacttttacttcttactcttccaggattagttttatcaattcttcctcttattcctggatatctttggactttaccatatctttctgtttggccacttataactattctctttttacccacttgtttgtatgcaagattttgtgatctaaaacaatcaaaaacattttttactatatgtgcattcccatc

SEQ ID NO: 4830 - DNA, 200 bp, Lawsonia intracellularis
tattgggatattgcctcttgctatttctatcaactctatgcctcaatatattcctataggtctaattaacctctttcctataataacacttactctaagtgctatgcttgttgcacttgtacctaatccaaaaccttcttctggagctatacgacgggaacacccttcttctaacataaaaataccatctatacctaata

SEQ ID NO: 4831 - DNA, 200 bp, Lawsonia intracellularis
aacaaaataagatacagatgaagaaagaagaagaacaaagaacaacaactacaaatttaaatatagaaagtcttgaacaacagctacgtgcacctttagagcgtatacgtaaagaattaagtatacttaatacatcgctacagtcgacacccttacaacagcacattgaatctattgaaaatacagccgaaggtctttct

SEQ ID NO: 4832 - DNA, 200 bp, Lawsonia intracellularis
catattattaatgatatacctgaactatttatctccaaaactcatactgacaaagaaatttttgacttaaaccaaatagttctgggtatccatgatgctgtcaataacgatgcagaaagtaaaaatcttgctttttcttggtttatagcaccgcatctttatcaaaaatatgaaggtaacccaacgcagctaacacaagt

SEQ ID NO: 4833 - DNA, 200 bp, Lawsonia intracellularis
cctttatatgcttgttgaaagctccatacaagctacagaaaaaggacttgtacaactacgtattcaacgggtacctaatagtataaaccctggagaactacttattacagtttctgactctgggaaaggatcaccaccaattacacgtagcccgcttgctcttattcatgcttgggaattagcaactagcactggtggct

SEQ ID NO: 4834 - DNA, 200 bp, Lawsonia intracellularis
ctgtgacaatgaaaagtgagccaacaggaacaactatctcatttagtatctccctcactgctaaacaaacaactacgtctttatcccaccaacatgatgagtcaattactactactgaacagccaacaacacaattatcacaaattattattgttgatattgtccctagcaatagacaacttttaacttactacttagat

SEQ ID NO: 4835 - DNA, 200 bp, Lawsonia intracellularis
gaacttccctataatatctttgaagcacaagatgttactactgtctataatctatataaacaatctccaggagcagttatcatttttggaccagaactgtctgaaactattgctattgaaacaataggagctattagagtatttgagggagaacacaacttccttcctgcaccaatattagctatttgcaaaacagaagc

SEQ ID NO: 4836 - DNA, 200 bp, Lawsonia intracellularis
tcaaaaagaaagactcctaagaataggctgtacccatgtaattatcgaaccattaactcgtaagacctttcgacaaactatattacagttatcgcctatttctagccatacccaagctatacctagtcctcttttggaatcaacatctaaaaaaatcaaacagacagcacctactagttctgttaactcaaaactaatag

SEQ ID NO: 4837 - DNA, 200 bp, Lawsonia intracellularis
acacagtaaatgattcacaaataccatgcatggagacgcctatacaggatatacccatatctcctcatgcctctctctattctgaagataatacttcagagtatactcatgaaaaaaaggggatagcactcctaaaaaccccagatcaaattaaaacaaaaaaactttctataattaaaggagaacctacacctatttct

SEQ ID NO: 4838 - DNA, 200 bp, Lawsonia intracellularis
tcttcgactcatcaacaaaggaatgatacatctctaaccaataatgttagctacaaagtagaacaatatcctcttatgagttcatcagagtgggttggtgaacctactcctattactaagcaaaaaacttctactaataaaacttcagctagattatcgcaacattcatcagaatgggttggtgagcctattcctattat

SEQ ID NO: 4839 - DNA, 200 bp, Lawsonia intracellularis
aaaacgaaaaaaaccaccaataaccccacctaaaaatgatcctttacataatactgtagagtgggttggtgaacctatgcctattactatagcacagcaaaaatcattaacaattgaacaacaacctatagttaatctaacaatagaagatgaacaactatcctcagaaaaaagaaaaattgttgaggaaaactatacga

SEQ ID NO: 4840 - DNA, 200 bp, Lawsonia intracellularis
caactatagaaaaaacactgtcagcagaacctaaaccacacgagcaacttgcaactattactaaagaaaagatagaacacattgaacctatagtaacaacaaatgatatacataaaaataacctattagagaatggtacatcttttaatgaaaaatcagttatactacaaaactctatagagatacctgaagatttatca

SEQ ID NO: 4841 - DNA, 200 bp, Lawsonia intracellularis
atttattccccaagtttacacattcaaaattcccctgaaaaatcttttttatcatcacaaagtgaacctgataacaactctcaatgcattaataactcatcaaaagaaatagatacaattcaagaagttcccataacatcatctgactcggctattatcaatcaaaaagataataaacatcatgataacctattaacagc

SEQ ID NO: 4842 - DNA, 200 bp, Lawsonia intracellularis
tactacaactagacaaaagaagcataataattctcgtcaaaaaaactctcgacatcaaaaatcatcactatcattattagatatgataacaataccaacagaagagaaccaagaaacaaaccatacacaaaaagctcttaatactgatagctacttatctatggttggacaccctgagataccagaagaacatatcataa

SEQ ID NO: 4843 - DNA, 200 bp, Lawsonia intracellularis
cattaacagaaacagtagatacatacaaaaaagacacattatcagtaaaaaaagacataccagacttatttagtgttcaccatccaacagaagtcatagaagattttacttatccaaaggagcagtctgaacaactaagtatgatgcaactttttagctcaacacttaacattgtcgaagaaaacgacttgggaactcat

SEQ ID NO: 4844 - DNA, 200 bp, Lawsonia intracellularis
tctaaggaacttttccaagaattagatattacattaggattattacaacaagctatccaaacaaaacaatctgaaaatcttgtatccttttcacaggtcattttatctctctctgaacaactaaagttaaaacatctaaaaacactttcttactctttactcgacgctatccaaacaagtaaagaagatataatagaaca

SEQ ID NO: 4845 - DNA, 200 bp, Lawsonia intracellularis
acttattaaagatataaaagcagaagtacaacataaccaaggggatactacagacttattatagtctcaaaggatggtagtatattaacactaaccttttcatgtctcccttataatcatagcaaattttattgatatattttttatctaatataagttaaaaactaatatgtttaattcataatactctcaaagacaaa

SEQ ID NO: 4846 - DNA, 200 bp, Lawsonia intracellularis
aatgaaaaatttaacttaacgaaaataatacttaggttaccttttaggcatactccaccataaactaacaaaaaattcacctgccaacttcaaaaagaatatataaaaaaataaggtacaataagttgccttatagtatttcttagagttatacatcgttatcaaaataaaaagagctgctcttatcaacaatctttccc

SEQ ID NO: 4847 - DNA, 200 bp, Lawsonia intracellularis
agaatgacataataaaaggtctaatatgcaaaatatacgctctagttatactgactctattaatttctttggtaagacatcacctgaagaactaataaaaatttatggttcacctttatatgtatataatgaatccataatccgacaacgatgtaaagaaataaaaagtctatcttcctatccaaatttttttgtatctt

SEQ ID NO: 4848 - DNA, 200 bp, Lawsonia intracellularis
attctgctaaagcaaatacaaatcctacattactctctattattaaagatgaaggatgtcttgtagatgctatgtctcctggagaagtatatctccataaaaaagtaggatttaagtctgatgaaatactttatgtatgtaacaacatttctgcagaagaaattcaatatgctattgataacaaaatccttcttagtata

SEQ ID NO: 4849 - DNA, 200 bp, Lawsonia intracellularis
gactcactttctcaacttgaaacctatgggaaacttaatcctggggggaaaataatggtccgtattaaccctgggataggtacaggacatcataaaaaagttataactgctggaaaagaaacaaaatttggaattaatacagaacagtttagtgatgtaaaaaaaatagtagatacgtatcaattgatgctagttggaat

SEQ ID NO: 4850 - DNA, 200 bp, Lawsonia intracellularis
aaatcaacatataggttctcttttcttagatccccaaaattatcttgactctattgcttttcttcttcaatttatagacaataacccttggatttttgaacagctagaaattatagattttggtggtggttttggtattccttacaaaaaatatgaagaacaaccacgacttgatctcaaaaaaatgtcagaacagttca

SEQ ID NO: 4851 - DNA, 200 bp, Lawsonia intracellularis
atacaaaaattatggactgggtagcatcaactggttataaaggacgtttctatattgagcctggccgttatatcattgcagaaagtgggatattacttggttctgtacatgttgttaaatataatggtcctatacgctatataggaacagatgtaggattcaatgtccttatgagacctgtattatatgatgcttatcat

SEQ ID NO: 4852 - DNA, 200 bp, Lawsonia intracellularis
gagattgaagtctatcgtaaaaatggtacaccagacttacagcttattccacagactgtagtaggaaacatttgtgaaagcggtgacattatagcaaataagcgtcctctacctctcattcaagaaggagatataattggtatcttagatgtaggcgcttatggatttgttatgtcatcaaactataatcaacgtccaag

SEQ ID NO: 4853 - DNA, 200 bp, Lawsonia intracellularis
accagctgaagttctcattcaacagaatggtgaaccaaagcttattcgtaagcgtgaaacaattgaagatatgaatattcaacttcattaacatgttataaatcaggacataccttatgccttctttttcttttgtattaagatgttgcctgctctttttaatggtactaacctcacaaaccttgtctgtttcacagcca

SEQ ID NO: 4854 - DNA, 200 bp, Lawsonia intracellularis
ctaagagaagaagctgaagggaatttaccacaacatattgaagctaccttaactaaccttattgaagcaacttcttcaacaaaacaatacccttctgtttcacagcttgatacaatccttcaatttgtaacatcgactaatgaacaggctcataaaatccttccagccacacgtgattatggtaaaggtattttttataa

SEQ ID NO: 4855 - DNA, 200 bp, Lawsonia intracellularis
aactactataaatattccactgtctaccttaattaaatattttcttaacccagaaattccaggagaagcactttatcctacaagtatccgtcgtaatgtatggcaagaaggaagtgaaatcctccaaaatagtaatatattcttagcagcacctcttcctccccaaaaacctattttctctcgaggaacagaatatgaag

SEQ ID NO: 4856 - DNA, 200 bp, Lawsonia intracellularis
aaataactcctgatatatctagcggatgttattataactatattttaaaaagactatttattttatataaatttaagagtgaaacagcgtttattactgtttcatttatgccaaaagaatcatctgttggattacgtggcggtgttattggtaaagatactgagtgggattatgtctatggtccagacataggcacaaac

SEQ ID NO: 4857 - DNA, 200 bp, Lawsonia intracellularis
ctgcctatgctaacatgggcaaaaacatatctttatggttcagcaactattaacattttcacccaaaaacctaatagtcctactacagatatttatatattcaaatggacaagtgctggctggtcagggatgaatgttgtaacacataaacacattagaaatggggttattcgctttatttcaggtttgaaacaaattat

SEQ ID NO: 4858 - DNA, 200 bp, Lawsonia intracellularis
ggaatccccttatctcccctcagaacaagaaattattaaaaaacatagcgagcttaacacaatgagtcttaatgaattacaatctgctctcaaaccatttgcatcaaaacttgcagcaaaaagtcttaaagattctactctatcaaaagataattttcaaaaaattctaaaaaatgacgtctaccctacaacactaacaa

SEQ ID NO: 4859 - DNA, 200 bp, Lawsonia intracellularis
aagaaaatgctgttgctgaacttttaaaacgttatatgaagcaaaaaattaatcaaactatggaaggaaagacaactatcacatcaaaaaaataacttattgtaatataaaaaaggtaaataaaccttttcataaaaacattaaaaaaagtaaccatactatagttaataccttttataatacttttagtcttgcaagta

SEQ ID NO: 4860 - DNA, 200 bp, Lawsonia intracellularis
gggttgttattatgaatgatggatgtcttcctgaagaatttagacaacatcaaatagatgatatatattttgaagaatcctatgagtcaatggatcctcaacacagggtatggattaaaacaactttagctctaacaggagcattttataatatattccctggtagaacaatatctactcaagaaaatctgtctattggt

SEQ ID NO: 4861 - DNA, 200 bp, Lawsonia intracellularis
tttcaactaaaaaaaacttttaaaccttttcattggaccatcttactcttagatgaacattatatgtcttcgccaagaattgcagcagcaattatgcctgcacagcttgctggagttaaaaacattatagctgtttggaccagtaaaaataaccgactgaccgctgaaaaaatctcacctgctttactaacaacattaga

SEQ ID NO: 4862 - DNA, 200 bp, Lawsonia intracellularis
actttcaggagttaacatagccctaacacttacccacactgaaactgaacttcttattcatcaattaatgaaaataggtattggaaacctgttatattttttaaaagaagaagacatactacatatatctactatacctgtactacctttctggaaagaatatacttctcatcgacttgttatagaaaaagatgctggca

SEQ ID NO: 4863 - DNA, 200 bp, Lawsonia intracellularis
ttaatacagaaatcctccaatgggcacatcctcattcaattatagaacaaatagcaacagaaccatactctgaagatatcccagatgcactttactgtgctagctcatccagtaaaaactatacatcatacagaatcccaagaatttttcataatggacttgaagcatattggattcatccaacactttctccagcctcc

SEQ ID NO: 4864 - DNA, 200 bp, Lawsonia intracellularis
tttctccatacaacatgggatttatctttgctagaacaagactaacctatacaataaacataattaatataagatagttactctaactaataataaaatacatgaactaaaattataattccctaataagttaattatctaacgacataaagtacatagcaagtaatctaagcaatgcatagaaaaattgattgccagtt

SEQ ID NO: 4865 - DNA, 200 bp, Lawsonia intracellularis
aggccttttcctgtcacgatatcttaatgaaaccactgcataatatcatccttattatgtctatagctttaatgggagttatgggcgtatccattattcttccagtccttcctctacttgcccatatatttgaacttactcctactgaagtaggacttattataacctgtttttcattgccaagtgctttatttactcct

SEQ ID NO: 4866 - DNA, 200 bp, Lawsonia intracellularis
gttgccggaattattgctgatctttatggaagaaaaaaaattcttttattaggtctggccctttttgcacttggaggagttggatgtgcactctctacctcctttaaaggacttcttttttgtagagctatccaaggtcttggagcagcgcctctaggaatactctacagtactatcattggagacctttataatgaaga

SEQ ID NO: 4867 - DNA, 200 bp, Lawsonia intracellularis
agagcgtcctaaaatgatgggcatagctggtgcgacaataagtattggaacagcaatatatccggcactaggtggatttgttggagaaattcactggactcttccattctggttttccttattatctctccctgtagcaatcatagcccttatttatccctatccttataaaggaacaaaaacatctatcaaagactaca

SEQ ID NO: 4868 - DNA, 200 bp, Lawsonia intracellularis
caaaaatttctggaaaacttatttttcattcacattcagtaggccttttaagtattacttttctttgttttagcattctgtatggcccaatacttacctatttccctttaattgcaaatttactctatcaagcttcacctatccagataggtataacctttagtattgcctgcttaggtactgcaattatcgctattaat

SEQ ID NO: 4869 - DNA, 200 bp, Lawsonia intracellularis
cttgcacaacttagtaggacatatagtcacaaaaaactgcttattatagctgctggttgttactttatttcccaaggacttgttattattctcccattacaaagccaaaatatttggctacttacattacctatttttgttttaggaatagcacaaggtatatcatttcctttagtaaacagccacattacatcacttgc

SEQ ID NO: 4870 - DNA, 200 bp, Lawsonia intracellularis
accaacatccaacagagctattgttatggctataaacagtacatttatgaggttaagtcagagtatttcgccaattgtttttggtattggatggtcattttttggttggcctggtccttttatatttggtctttttacttctattatattagccctcttaattatgaaagtattttcaagatgtaacccaatatcaccta

SEQ ID NO: 4871 - DNA, 200 bp, Lawsonia intracellularis
tttttgataactagtaaattttattattaaaaagcttagttagttaagattacatatattatatacaattactataacattaactaattactaactattacttccaattgattaattgatgctatttaaagaggatatattaatgatgtcatggctcacaataggtgttatccttggattagtgcaagggatcacagaat

SEQ ID NO: 4872 - DNA, 200 bp, Lawsonia intracellularis
ttcttcctgtttcctcaacaggtcatttgattattgtagctaagtttcttcactttacaggctctaaagcaagtgtgttcgaagttgctgtacaacttggatccattatggctgtagttgtcatttactggaatagatttataggactaataaggccagaaaagaataaaaaatttacaggactatatggtatttggctt

SEQ ID NO: 4873 - DNA, 200 bp, Lawsonia intracellularis
ttatttttaacaacattaccgccaggaatcataggatttttatttcatagctatataaaaacacttttcaccataccaagtgttatagctgcattaacaactggctctatatttatgttgattagcgaacagttatgtagaaatatttctcaacgtatagttacacttgacgaattaacgcctaagactgctcttggaat

SEQ ID NO: 4874 - DNA, 200 bp, Lawsonia intracellularis
tggcttttttgaatgtttagctctttggccaggattttcccgttctgcagcaacaattatgggaggaatgcttcttggggcaaagcgtcatcttgctgctgaatattcttttattgctgctgtgcctgttatgtttgcagctacaggctatgatctccttaaaaattgggatctttttactgccaatgatcttcctcttt

SEQ ID NO: 4875 - DNA, 200 bp, Lawsonia intracellularis
ttattacaggaatgatatgtgccttcttagcggcttggataacaattaaagtttttatcttacttataagtaaaatctcattgcggccatttgcttattatcgtcttctattagcatttattgtatatttatgtattaaataatatacccaggtcgactatacatacatctaattcataacaattgaaaactatataata

SEQ ID NO: 4876 - DNA, 200 bp, Lawsonia intracellularis
taaatgttaatcaaagtctgctaataacgtaccaaaagaaagtgtaccaaaagttaaattatgaaaatctgcatggatgcgagcaactgctgcatgcaatacaggagatgaaatacctttatatattgaagtatgtgcctctaagaaagcagcaagactatcacatgcttttaatagttgaccgtcttttggatcaaatt

SEQ ID NO: 4877 - DNA, 200 bp, Lawsonia intracellularis
catctttattgttaaacaattgaagctcttcaaagttcttaatacgttttacccctgagctatcttgtattgtttcttgaaattcggatgtaacatcttcaccaagtagccctaagtagtattgcaatctatgtacaagatctatataacctgacttccgcaatggtacaaaaatacgtctctctaattcttgtaattca

SEQ ID NO: 4878 - DNA, 200 bp, Lawsonia intracellularis
tactcttttaacaatattgaaaattgatccacagaacgctttacaggtgttataatatcacgagtcaaaagctctggtaaatcatgaaataacccagcaaaaaaattgtttacacatcttgctggacaacaacctataacaagactacaaaaatatacatatccagctactaaaaacatatgacctaaaactgatgtttc

SEQ ID NO: 4879 - DNA, 200 bp, Lawsonia intracellularis
aggaacacgaggagtatccgaccaacgaatttgaaaacgtaattgcccgcttaaccttgcaaaatgtccaagtgctgtaggattctctataaaaaaagcctctccttggattaagtcttgtacccctgtaagttcttttaaggcaaaaagttcagagataaaaaaatgggaaatattttttgtctcctcatcaaaggtat

SEQ ID NO: 4880 - DNA, 200 bp, Lawsonia intracellularis
taaaaggttgaataagtgcaaattcccatcctgatgcatacaacctagctgccttaataattttgtctgcaagttctgttcgatctgtttggtaatgatattttaccatacgatcccaaaaatccctactcaatggttctacaattggttttaatttatttaatacccaatcagtaagttgtcttttatgaatgtgatgt

SEQ ID NO: 4881 - DNA, 200 bp, Lawsonia intracellularis
tcacaaattctatgaaaaatttgtggtgtaatatctgttactattaaaccaaataaataatcaaataatcctctctcaataacagtttgttgtaatgctatcttttccgattcagaggcatgacgactatttaataaagtaagcatccaagcaataatcattttatgaccttgcttatctacttcataaagttctatagg

SEQ ID NO: 4882 - DNA, 200 bp, Lawsonia intracellularis
acgaagcttatcattccatcgacgcatagatgcacctaaaaacataatttgtaacagactcttacgaatagaagacataccttctccatataactatcttatttttattgtaaactttgaagctatacctgacaaggtttaactaattaacaaatcatcttttttcctgcttgacaagaagtatctagtaatttatgaaa

SEQ ID NO: 4883 - DNA, 200 bp, Lawsonia intracellularis
tatgtagtatttttattcataaaaaacaggagacgcttcgcaaatgaagacgtttagcccaaagccagaacatattagccaccaatggtttctagttgatgcacataataaaattcttggtcgtcttgccgctcaaattgcccatagacttcgtggaaagcataaacctgaatttgctccacatatcgataacggagact

SEQ ID NO: 4884 - DNA, 200 bp, Lawsonia intracellularis
atattgttgtagtcaattgtgaacagattaaagttactggtaacaagcaagaacaaaaaaaatactatcgtcattctggatatgtaggcggactaaaagaaacaacattaaaaacacttcttgaaaaaaaaccagcagaagtacttatacatgctgttcgtggtatgcttcctaaaaatcgtcttggtcgtgctatgtta

SEQ ID NO: 4885 - DNA, 200 bp, Lawsonia intracellularis
aaaaaacttaaagtctatgctggaccggagcatcaacatatagctcaacagcctattcctttaagtcttccttattaatgacattaggagtttattatgtcaactgaatttaattatgctacaggtcgtcgtaaaacagctgtagcacgtacaagactctaccctggaaatggaactattaaaattaatggtcgtcctct

SEQ ID NO: 4886 - DNA, 200 bp, Lawsonia intracellularis
tgaaaattattttcctagaaaatcattacagatgattatccgtcaaccactagtccatacaaaactattagataaatatgatataaaaattaatgtaagtggtgggggagtatctggtcaagctgaagctgtacgtcatggaatttctcgtgcacttcttgaagttaatccagaacttcgttcccttttaaaacctgtag

SEQ ID NO: 4887 - DNA, 200 bp, Lawsonia intracellularis
gctttttaacacgtgatgcacgacaaaaagaaagaaaaaaatatgggttacgtgctgctcgagcaaaatatcaatattcaaagcgttaaaattttatattgtattgttactatattatcaactttttttaaaaagcatctgtactcttctaagagccagatgctttttaactaacttacttaagagttatataaaaaatc

SEQ ID NO: 4888 - DNA, 200 bp, Lawsonia intracellularis
tctgccataatgagcagataatatatatatatattaactaataactcttataattatgagatactgaatgaaagatgaatttttaactataacaccactaggaggattagaggaaattgggcttaactgccaactatgggaaacatccaaaggagttgttcttattgactgtggcatcatgtttccaaatgaacaacatc

SEQ ID NO: 4889 - DNA, 200 bp, Lawsonia intracellularis
ttgggattgatgttattattccacctattgatcctattttacatgtaaaaaatcgattactaggagttgttcttacccatggacatgaagatcatataggtgctatcccatggcttgtatgttttattcctggtctaaaaatctatggttctccctttactcttgcgctagttgagcacaaactcaaagaacgtaacctc

SEQ ID NO: 4890 - DNA, 200 bp, Lawsonia intracellularis
ctcagctcagcccaacttattgccgttactccaaaaactaaactcaatcttggtaacctttacttccaatttatttcagtaagtcattctattcctcaaagctatgcgcttgcagtgacaacacctgttggtaaaattattcattctggggattttaagatagatccaacaccatcagatggtattggcacagatttgca

SEQ ID NO: 4891 - DNA, 200 bp, Lawsonia intracellularis
atctattaaagaatttgctggtaatgatggtatacgacttttcctttcagactcaacaaacgcagatgagcaaggacataacctctctgaacaatatataaaaaaaaatttttatgaaatttttagtgaggcaaaaggaagaattattgttaccctttttgcaagtaatatagaacgaattcaaaccgtctgtgatttag

SEQ ID NO: 4892 - DNA, 200 bp, Lawsonia intracellularis
tcaaagtttttaataaaaaattagtggtaacaggaagaagccttattaataatatagaaaaagctaaagagctaggttttctcaatatcccctataaattttttactgatcaaaatgtaccagacctgtctcctgaacagacagttattatcactactggttcacaaggagaacccctttcagccttagtgagaattatt

SEQ ID NO: 4893 - DNA, 200 bp, Lawsonia intracellularis
tcaggggaacatcgctatctctctatccatgaaggtgatactgttattatgtcttcaagagttctacctaatagtactttagcagtaaatcgccttataaatagaatataccgattaggagcaactgtttgtcttaatggacaaaaagcaattcatgtttcaggacatgcacgtcaggatgaattaaaaattttgctcac

SEQ ID NO: 4894 - DNA, 200 bp, Lawsonia intracellularis
agtagttaatcctcaatattttgttcctatccacggagaatatagacaactatttcgacacaaagaacttgcaatgcaacatggaattccttctgaaaacatttttatccttgatgatggagagccccttacacttctcccaaccaaggtccgtaaagaaaaaaaaatacccttaaaatctattttgattgacggaaaag

SEQ ID NO: 4895 - DNA, 200 bp, Lawsonia intracellularis
gtattggtgatgttgatagtagtgtacttagggaccgacaacttcttggaggtgatggtgtagttgttgtgtctcttactagagataagggaactggatctgttatgcaggggccttctattctttctcgaggccttatctttgaaaaaaaactaaattgtcttatagaagaagcaaaacaagttgttattgaaatatta

SEQ ID NO: 4896 - DNA, 200 bp, Lawsonia intracellularis
caatcagatttaactctaacgactcaaaaactagaaaaaaaaatttgtacttcactacatagtttcttccgaaatgttattggaagagaacctattatcattcctatcattacagaaaactaatatttcttttattcttatattttttcttctacccactctaatatacatattatactataactataaataaaatacat

SEQ ID NO: 4897 - DNA, 200 bp, Lawsonia intracellularis
taaactaatctattagaataatataatattttatacttaaactgtaaaatatgtatatatatatattttaatatagacactatattagaataactgttatgtaacttattcattagtagatgaagccataacatattgtagtgctcatactacaagaggtaaacatgagtaaaaatgtacatattgaccttaaaatcgga

SEQ ID NO: 4898 - DNA, 200 bp, Lawsonia intracellularis
ataagttttgctatttctacaggaacgtttcttattttaggattatatattctactttcaatacaaccaattattgatcaatttaaaatcacaatcttagaaacatctgatgctataagcatcactacacggctattaattacaatgaaagaagcttctataaactttcgcagttatactgtaagagcagatcaatcttt

SEQ ID NO: 4899 - DNA, 200 bp, Lawsonia intracellularis
ctatgataattttactaaaaatatacatctttttaatacagcactagagcatgcacaaaaccttaatgatgattctatctcattaaaaatattaaataaaaacttgccacaagttatagctttaaaaaaagaatataaagaagttggccaaaaagtatacgatcttactgaaatgtttaaacaaaatacacctaaattag

SEQ ID NO: 4900 - DNA, 200 bp, Lawsonia intracellularis
cctttcttttaagtgcatttatcaatgacatagaagagtttttaaaaactcttgaagagttagttcgaaatactggtggcaaagatgctgaagctttcaaactaatagttgatcttaaccaactcattgaaacatccttacttgctagaggagatttttggagaggagttagtaatgcaaatagcaatgcttttgaaaca

SEQ ID NO: 4901 - DNA, 200 bp, Lawsonia intracellularis
tgcttaaaaatactcaaaggcagtattagccatatggaagctatcaaagaagcaaattctgttaaagaatttactgctccatttgaatcgttaattttttcaatgaaaaatcttgaaaatatctttgtaactataattaataactatgagttagctcaagaaaatatacagaatcaagatgcaatcgtacagagtatctt

SEQ ID NO: 4902 - DNA, 200 bp, Lawsonia intracellularis
aacactccttaatgaaatcctagaagaaaatatggataagataggaatagaatcaaagtcagcagttgaaaacttaaaacttataagaaatattgtgcttatgcttgtagcaataggtgtaatttttacaaatacagtaggatttattgttgcaaaaaaaataggagaaaaaacatataccccatcaaaataaaaggcta

SEQ ID NO: 4903 - DNA, 200 bp, Lawsonia intracellularis
ttgttttaaatttgtttataaaaaatgaagtggtgcctggagcgggagttgaacccgcacagtgaattcaccgagggattttaagtcccttgcgtctaccagttccgccatccaggcaataaaacaaaaaaacagttagaagaggtgaaaaatacaatggttaagctttgtcgtcaagctgaacataacaatcttacagt

SEQ ID NO: 4904 - DNA, 200 bp, Lawsonia intracellularis
tcaaaccaattaacgaaattacaaatatacataacttactaagtattaagtattttttctatttattgctttttaaaattatatctaattccaaggaggaatagtaaaagtatatttttgaaacgtcttatctgaagctacaactccttgtaactgattcaagtctctactaataagtaaaaactttccatttataccat

SEQ ID NO: 4905 - DNA, 200 bp, Lawsonia intracellularis
cacaagtgtagttacttaaggcttcacataattcattatattttctatcattcatgtcttcaaacgaacattgaacctgtaacccatctcctactggtgtaaaatcaagatgtattgcatcaaaactattaagtatctgttgaacaaaaaaggtaagcctctcttctttactcattatttcttcataactaagttctata

SEQ ID NO: 4906 - DNA, 200 bp, Lawsonia intracellularis
tcataaacaaaataacaaaaatactcataaggcaaatatgccataaatgctccaaaacttttgttgagtctttctaactcctgaattatattaagaaaatatattaacaaaaatcagaaaaactttctatatcttgtttttacattaattaaggttagatatgggaataaatgaactcaaaaggctatgtataataagct

SEQ ID NO: 4907 - DNA, 200 bp, Lawsonia intracellularis
atgcaagacttggaatagcaggattatctcctattatgccaggtagttgtggttcactcatagcagcaatattagccccctggctattcattccattctcaacattcacaagaatattaattcttatttttattttttggacaggtagccttgttggaacaataattgaacaattactacaaaaaaaagaccccaaagaa

SEQ ID NO: 4908 - DNA, 200 bp, Lawsonia intracellularis
gttgtgattgatgaattactgggtctttggatagtattacttccattcaaaaatcctggatggatttttattggattagcatttattctttttcgtatttttgatattattaaaatatggcctgttaatgcatcagagaattggttacctggtggatatggaattatgattgatgatgtatttgcaggactacaagcatt

SEQ ID NO: 4909 - DNA, 200 bp, Lawsonia intracellularis
actcattataagtatactatactggacaggttatctcaaccaatggctttaatattcatatcattctcctctatgataagtaacacttatgatccagcctatccttatacatccctttttttgatttatttataatgttaataatctttactataaggagcactcatggcattacttcgctactacctcactataggaat

SEQ ID NO: 4910 - DNA, 200 bp, Lawsonia intracellularis
tatatttataactttgttaagttcagctactgcaacacaacccaaaacagaatctcctgaatctattcttaataaacctgaaaaatctacaaaacgtaatacaactatttcaatcgaatttgaaggtactgatagtattggttctaaactttccacccgcatcaaagaattaatgaatgcaagtaatcttttcacactta

SEQ ID NO: 4911 - DNA, 200 bp, Lawsonia intracellularis
cagaaaaagattcccctaaaattcgtattctgcttgctacaatgtcagagttttctcaacgtccaagtattggctcagtatattctgttgtgtggcttttttcacaatcagaaacaacactaaaacattttcttgcaaaaaaaataggtgtacttactgctgatgaagtagaccaagttgcagcaatgattgtagagcaa

SEQ ID NO: 4912 - DNA, 200 bp, Lawsonia intracellularis
acagatacacttgctgtacgctatggttatctactcccataagattgtgtataatatattccattcccccctccacataaaaaataccggtaggcaaaccggtattttttcggaggtagactctaaataaatttgagctctcctgctcctgactactatcaggagagagtaccactaacgcttcatatttacaactgtct

SEQ ID NO: 4913 - DNA, 200 bp, Lawsonia intracellularis
ctaacatttggtcaatagtagttacaattttactatttgactggaatccacgttgtgttgcaatcattgagacaaactctgtagatatatctacgtttgatccttctaaagtattagcgttaattgaaccaaacccagaagtgtttgcagcacctgaagatgggtcccctgattctcttgtttgactaaataagttacca

SEQ ID NO: 4914 - DNA, 200 bp, Lawsonia intracellularis
ccttcacgacgtaacccctgtttagagttaaaatcataaagagctacttgatataatggaagttgtactccatttgaatatactccaaataacactccctcagcatttacactatagttcattaaatcaccaaaaccataaccattttgacttgcagattttgtagagctaccacctgcatagttagtaaacgcatttga

SEQ ID NO: 4915 - DNA, 200 bp, Lawsonia intracellularis
taagcggtttggtgttccattcatattagctaagtctttaacatttggtggatcattagcttctaatatacctgatgcagcattatgaggccaatgttcctttttaatgtcagctgcggtaccacctgcggcagttaatgcagtcttatatgcagcctgataagaagcttcatttttatatacatatggtggactctgtg

SEQ ID NO: 4916 - DNA, 200 bp, Lawsonia intracellularis
gaactgtgttatcatagttagggttaccaaaataatattgtggcattaccccagcaggattttccaatatctgagccataccaagttcagttactgatggagctggagttttatacccaccaactgtccaaccacctgcgacatccataggattatgtgtttttttatagcttaaagaagaaagaggttcatttgcattc

SEQ ID NO: 4917 - DNA, 200 bp, Lawsonia intracellularis
ttccatgtattatcaagatcagtagcttttaaaccaaagtcaatttctgtaaaaaaggtggtagcatcaccaacagatccagctgtatttttacctgggacaccagtaaaattagctacaatcataggaaatccattattagaaacttctgctggatagaagttttcagctggattatctatattaagaataggaattgc

SEQ ID NO: 4918 - DNA, 200 bp, Lawsonia intracellularis
atttccatctctatcaatagtaaaaccattaccattaataagagctccggttgcaggatcaactgcaggcttacgtgaaccattcagcgaatatgcactttggtttgcaagttttcctgagctatcaaaactcaatgttcctgacattaacattcctgcagctttagtatctttgatgtccacaatgttaccaccaacag

SEQ ID NO: 4919 - DNA, 200 bp, Lawsonia intracellularis
aaacttggcgattatcttcagaaggatccatagtaacaacgtattcccatacactttctccacttccaccacctttgtagtctttaggagaaacttggtcaaaatagactgttaatgtatgtgttccaccagcttcatcatataccttaatagatgtctgataactatatgcactttcaggcataggtggattgttaggt

SEQ ID NO: 4920 - DNA, 200 bp, Lawsonia intracellularis
tcacttggttgtttaccattccatatattaaataatgaggtaaatggactattaacgttttgagatttatctccagatttatcagaagaaaggtttacgttaaaacttacatttgttgtctgtaaaggtgcaactgtccaagtatcaagacggatatctgttggttcacctgtacccataatctgcgaagtatttgtacc

SEQ ID NO: 4921 - DNA, 200 bp, Lawsonia intracellularis
tggattaacaccacctgagatacgttgtggcccttcagtattatcaattttccaaccctgaagagcatatccatgaggatcaactaagtatccatcattattaaaacgaaaattacctgcacgggtataatatgaagtctctgatccttgtggtttaactttgaaaaatccacgaccaccaatagcaaggtctgttgctt

SEQ ID NO: 4922 - DNA, 200 bp, Lawsonia intracellularis
cagttgtggtttcaaaactaccctgaccaaagttccccatgacagctccaatgcctacaccacgtccaatttgtgtaatccctgcagtactaaagccatcttgataaataaagtctgcgaaatccatacgttggcctttaaagcctactgtatttacgttagctatgttattaccaataacattcatcttttcgccatga

SEQ ID NO: 4923 - DNA, 200 bp, Lawsonia intracellularis
cttaaaagtcctgaaacacctgtccacattcctgctgtaagactcatagtaatcaacctccgaatgtattttactctgcctgttgcctcaggtttttccagagtttagttttaattatatataatctaccttacctagataacttctcttttatagtgggtaatagctgatacaaatcctgcatcccagaaccttcagat

SEQ ID NO: 4924 - DNA, 200 bp, Lawsonia intracellularis
ccctctgtaccattagtttcaccaggatctgaattatccccaccacctgactcaccgtcttctgaatcaccactgtctgtgtcatcaccgggctcaactgtttttggctgaaccacttcacgaacatttgaaagagctactagacgtccatcagaaagacgtaataattgatccccttgatacattgtaacagcttctac

SEQ ID NO: 4925 - DNA, 200 bp, Lawsonia intracellularis
ttttccacttacagatgtgtctactaaaactggagcacctgctgaattttgacctgcgatattaactgtataaactccatcagaaactttacttccattaggaagcagcccatcccaatcaaaatcatgaataccaggtgcctttgagtccaattgaactgttgtaattagttgattagaagcatcaaaaatatttacat

SEQ ID NO: 4926 - DNA, 200 bp, Lawsonia intracellularis
aacctttaaccatttcttcattaattgcatattgaatattagaaatagtatcacctttaacggatacaccataaccacgagcagcaacttctttaccaataaaacttgcagcactaatcatttgttgttgtgtctgtaaatttaataaagactccatcttttcatttgtactcatctgctgctcaagagcagagaactgt

SEQ ID NO: 4927 - DNA, 200 bp, Lawsonia intracellularis
gctaattgagcaataaattctttatcttccatagggttcagggggtcttgatatttaaactgggttacaagtaatttaagaaaatcttccttacccagttcacttttaccagcctgctgagaaaaaatcccagttgctgagctaactcctgaagcaccattagttggcatgataaaactcctttatgcaatgatatctac

SEQ ID NO: 4928 - DNA, 200 bp, Lawsonia intracellularis
tcggctggtatttcctgccgtcatactgttattatgcatgttatgtgccaaggaaatttctaccccattatcttcttgtcctactcttccaagcatgcgtaatctctcaagatcccttactctttcagattgttcttgagagctattatgctgatccataccttgccaatgcatattttgttcgtctttcaactgtgttt

SEQ ID NO: 4929 - DNA, 200 bp, Lawsonia intracellularis
gtacttctactttagctaccttaagaccttgttgttctagctccgcacgtaagctatccatctgttgcagtaatgcagctgttgtttcagcacgttcagggcgcaatagtgcactcacctccccattctttgttgtaagcaaaacattcactgttccaagttcaagagggttaagtgtcaactctaatttactggttcca

SEQ ID NO: 4930 - DNA, 200 bp, Lawsonia intracellularis
ttacgaagtgcagaaaatgccccttgctctatttgagaaaacattctagctgctaaacgatctattgcagttagttgagcattttgttgtataggttgttgaagaggaataactgtccccacagattgatttacccctaaacgttgtgcaagagattcccatgggttagaactagttgtagtaacaccttttcccttatt

SEQ ID NO: 4931 - DNA, 200 bp, Lawsonia intracellularis
atcagacaataaacccttactatcttgtccattatttttttcaaataatccatcaccactattcttaccttgaaataaattttctttatcaccagtttgaggttgaaattgcccggcaaattttgccgaatctgtattttgtcttgcaccctgtattttattaagagtttcactagctacgtcttgttgttgagtattag

SEQ ID NO: 4932 - DNA, 200 bp, Lawsonia intracellularis
ctattccattttttgtaactgtatcctgagtttgttctgcaccctgtattttattaagagtttcactagctacgtcttgttgttggatattagctattccattctttgtaactgtatcctgaataagaattttactctgctctgatcgtcttgactcaatagtcccagctgaaatctcctcatccatacgctttttagct

SEQ ID NO: 4933 - DNA, 200 bp, Lawsonia intracellularis
tctttaattacaggcattaatgcaccttcaagttggcttgccaacttactctgtgcatcaattttatttgtcatttgttgttgaagtggtacaagtaaatttcttaactgatcaggagtaagggataactctttacttcccttaaaactttttgataatgcatccaatgttgcagagtttgcccctaacgcctttccaag

SEQ ID NO: 4934 - DNA, 200 bp, Lawsonia intracellularis
agaaacaatttctttatgactaattgaaagttttacatttggatcataacttgataatgctttacttaaacgatcccatgcttgaacagaacgtccttgtctgaaatcactaagaactctctctcctaactgacctgaactatccagtttatttgctagtgatctaatatttatcatatcgctttcactaagacgcacag

SEQ ID NO: 4935 - DNA, 200 bp, Lawsonia intracellularis
gagcttcataagctactgcttgtatgacatcaccaatagctgttccattaggtgaaccaagaagattctgaacagtttcagttgcagcaccttgggctgctaatgaatcaataaccttttgcaactcgctatctgtaaaacgtatatcatcaatagaagaagaggatggatataatgtacttacatctactctaagctct

SEQ ID NO: 4936 - DNA, 200 bp, Lawsonia intracellularis
gcactattatcataaggagcttctgtactaaaaaatgatgtatttttatctacagaatcataaaataaatttggcgtaatttcagctggagtatttttaaaaaacttagtaaagagctgattaaaagcaaagctatctctaccattacctctagataatgatgaagcttctttataaagcatatcggaagaaataggaaa

SEQ ID NO: 4937 - DNA, 200 bp, Lawsonia intracellularis
aatctgcatggctatactccttgtaggcaaaatagtacaaggagtgttccaaaaattttaatgtgtgtattcccaagaagatacgattattagattaagattctaggtaacttttacctattaattaatactccatactaattctagcctactactaaaatacaaaaaatatctaataaaaaatatagttatgatgaaaa

SEQ ID NO: 4938 - DNA, 200 bp, Lawsonia intracellularis
gttgatagtagatagcttactaacattgagaagcaaaactaaaagtttctattaacgaagaaagcaatgtacctgtttttttccatgctttattactaaatttattattttgtaataacaaatcaatataacctgtagctggccttaatgcaggcataacgctgaaccaatatttacttggaacaatatcacttcctttt

SEQ ID NO: 4939 - DNA, 200 bp, Lawsonia intracellularis
ttaagaacttttgcaacattcttactaagacttaataatgttttttgcatagggttacacatatgaggagcattctcaaaaaataacttagaaacaggtataagtttgtctgacattccaccaagcattgcaataaaccactctttccaaaataaacctaataaatgtctctgatgctcaatattgggaagcaatggaac

SEQ ID NO: 4940 - DNA, 200 bp, Lawsonia intracellularis
caaagtaaataatcctcgttcatctctacttgttttatatatatgtaacccagaaaatattgatttctctaaagaactattctctattaaatgaacaataagtctacctattttccctggggtaaataaactccggcaactaaaatctctcccctcacaattccaacaacctacacaactcatagctggcctaactacaa

SEQ ID NO: 4941 - DNA, 200 bp, Lawsonia intracellularis
tatgtccaggagatgcaggagctgtctcccatggatttacatttcccatagacaaattcaaaacaggagttcctgtccatgcagccaaatgcattggacctgtatctggagtaacaaataagtctagcttttgggaaaaaagtactaactcagaaagattaaatttcccagcaaaattattagacgaatttaactgagct

SEQ ID NO: 4942 - DNA, 200 bp, Lawsonia intracellularis
atgtctatacactcttgagctaagctcctatcattaggacctccaagaaaaattgggtataagttatgccttattagataacgtgctagtaaaccccaaaactgtgcgttaggacgctttccagcctcgcttgcaccaacaaaaagtccaatatgtcctgaacttccaatattacgtaaaggtggccatataacctcttt

SEQ ID NO: 4943 - DNA, 200 bp, Lawsonia intracellularis
aaatgactgctctggaatcagccctaatgcttccaaatctgaccaatggaaaagattatgcctattattattaactatagaactacggtataatctccaatcacctgctatatataaaaaatcttcttgattaaaaatacctattttctcttcagtagttaatacaccagtaagttgagcagctatgtctctatggctta

SEQ ID NO: 4944 - DNA, 200 bp, Lawsonia intracellularis
aattaataacccgcctatagttccttaatttaagattaggtatcatagagtgatcaaaaaaaaccacttgaggagcaactgtaattaattctttaaaaaaatgaggttctgcaagaacccataaaggatgatttggctctaacatcaataatcttttacacaaatgaaatgatagtattaaatcacccattcgttgtaat

SEQ ID NO: 4945 - DNA, 200 bp, Lawsonia intracellularis
tgaataatcaatgttggactttgagtcatatcttcatattatcctttatatctcatggaaataaataagatagtttattatatttctttataattacaatcttattagtacaaaaagattatatcttccataatatatttaaaattatacactaaaaaactataaaaaatgccccagaaggaatatatccttttggggca

SEQ ID NO: 4946 - DNA, 200 bp, Lawsonia intracellularis
tcaacactatacattaaaaggagaaaggaattattaaatatatagcaaattatatgccaaataatactattcattatctcttataataaagaggagttagatactgcttacttgtaataagaagtacaaaaatttatactacttaatagttatcttaaaatttatatataaaaacaaaaaattttttactactatttaaa

SEQ ID NO: 4947 - DNA, 200 bp, Lawsonia intracellularis
ataatgatatatacaaaaaaaactatgtttaactaaataaaaaaataaaaatttactattataatttataaaaactacttatttataatataatataaaattaaaatattcatttttttataattaatatagtaataaaaacattactacgatatatttgtagtataaaatttttacataatatattataatattataac

SEQ ID NO: 4948 - DNA, 200 bp, Lawsonia intracellularis
aatgccggttatttgtcattagtattaagattggattgatataacagttaatagagtaaaaatatgatatgtaacatttctatatttattacttttttaagattggtatatccattgcatgatttatggtaaccaaccatttcaggaggtttgccatatgtctttggtcattaacaacaacatgatggctgcaaatgcag

SEQ ID NO: 4949 - DNA, 200 bp, Lawsonia intracellularis
cccgtaacctcaatgaaagttattcacgacttagccaatcaacaagacgtctatcttctggacttcgtgttgggacagcagctgatgattcagcagggcttgctattagagaacttatgcgagccgatattaaaacatttcaacaaggtgcaagaaatgcaaatgatgctatttcattagtacaagttgcagatggggca

SEQ ID NO: 4950 - DNA, 200 bp, Lawsonia intracellularis
ctaggtgttatagatgaaaagcttatccgaatgaaagagcttgctgaacaagctgctacaggtacttataattcaacacaacgcttgattattgaatctgaatatcaagcaatggcttcagaaattacacgtatttctgttgcaacagaatttaatggtataaaattattagatggttctctatctggacctcataaagg

SEQ ID NO: 4951 - DNA, 200 bp, Lawsonia intracellularis
aactaatctacaacaaacaggagctctaagagtacattttggtccagggaatagttcagcagaagactattatgaaattagcatacattccgctacagcttctgcactaggccttggaaatggaactactggtcctggtgctacaatctctactcaagctgcagcacaagcagcgttagacgccatcaatgatgctatcg

SEQ ID NO: 4952 - DNA, 200 bp, Lawsonia intracellularis
tttctaaagataatattcgtgctagccttggtacgctacaaaataggttagaagcaacaattacaaacttaaatacccaagctgaaaacctccaggctgcagaatcacgaatttctgatatagacgtttcaacagaaatgactgaatttgtaagaaatcaaattttaacacaatctggagtagcaatgctttcacaggca

SEQ ID NO: 4953 - DNA, 200 bp, Lawsonia intracellularis
aactcactgccaaagatggcaagccaactcattagtggctaatccatcactacataatatggttaaggcagaccaaagacacatggcttggaggaaagaagttgttgtattcttttcttcaagccatgatacttattgatttattgtaccgttatgataatattgtctatttataatcttttcctgctctacttacttta

SEQ ID NO: 4954 - DNA, 200 bp, Lawsonia intracellularis
tatattaactatttttataactaataaaaagaatcatataagcttttacttatcattaactgattgacaatgcatcaaagactctaaagcaatacgtgcagcttcttgttctgccctttttaaacctgtaccactggctctaaaaacttggccatctggaagttcgacacaaacttcaaaaattttttcatgttcaggtc

SEQ ID NO: 4955 - DNA, 200 bp, Lawsonia intracellularis
catgcattccttcaaggatatattttggtaatcccttaatatgtctttgtgtctcttcctgtaatcttgttttaaaatctttaactaatgcggcactttttttaggccaaaaattatcataactcttgctaattacttttcttgcataaaacaaatctccatcaacaaaaactgctccaaagacagcctccattgtatca

SEQ ID NO: 4956 - DNA, 200 bp, Lawsonia intracellularis
gcaagtaaagtatttctttgtctgcctccctgattttcttctcctcgtgctaataaaagatattgattaagtttaagttctctagcaagaaggactaacatttttgtattaacaagattagatctcatccgagttaattctccctctcttgcctcaggatgacgtttaaataactcctcagagatacaaatttctaatac

SEQ ID NO: 4957 - DNA, 200 bp, Lawsonia intracellularis
agcatctcctaaaaactctaacctttcattatgttctgctgttacatcattttcatttacccatgaactatgtgtcaatgctgttataagtaactgttcatctttaaaataatatcctaaatcttcttgtaattcttttaaatccatcttagccttcttttatcttttcacatttagtatataatagtatctatgattaa

SEQ ID NO: 4958 - DNA, 200 bp, Lawsonia intracellularis
taattattgtagtctaaacttgacataacaattaggactccctaactatgccaatagaacttcactaaggagattatactatgtcttatactatccgtatggtaaaactttttacaggtgaacttgtactaggaaaatttgatcctgaaaaaaatatacttaaggatgttgctttactacaagttatccccacacaacaa

SEQ ID NO: 4959 - DNA, 200 bp, Lawsonia intracellularis
ggtgctcaaatgatgatgttaccttatggatacccatttgaacaagaattttcaggaacaatagaagctaaattctttatttatgaatataaaaaagttcctgaagatcttgaaacaaaataccttgaagcctgcacaaatcttacactttcaacagctggggtaactcttacaggagcaactcctagtggaaaccccac

SEQ ID NO: 4960 - DNA, 200 bp, Lawsonia intracellularis
aggattaattaaataacgatctagtatttatcaacttactggatgaaaaccatattctctttaagttaatctagttctaataatataactagattaacaaagagttttatactaatcttactgcattaatagttattactattaaatcaattgttactatagataataatagttatggttatgttatttttctttttaat

SEQ ID NO: 4961 - DNA, 200 bp, Lawsonia intracellularis
taattatggtataaaaaaataagatacactactagctaaaaaataaaagtagacgaattataatagttataggtaaaaagaatataactaataaaaattcttataatattaagaactaacctaagttatagagcatatttatcactataaaaaatttttatcttacttttcctaacaaactagtaaaataatataatcct

SEQ ID NO: 4962 - DNA, 200 bp, Lawsonia intracellularis
atgatataaattacactgatatctcattaacaaggtatttacttatatagctctagcagtcctttcggaggatttatcctaataagttgagcattagtgtcaacctctaatacaaattctggtatagctggtaaaagaacttctttcccttctggagtaatgatcgaccacaattcctgtcccccaggaaacgatacata

SEQ ID NO: 4963 - DNA, 200 bp, Lawsonia intracellularis
ttccaacttacctataacttcatctgtattatctaatactacagaaaaccctaatagatcacatagataagactcattactttctatctcaggtaaaaaacttcttgaaacaagtaatgtttgaccacgtaagacttctacagcacttctatcagaaaaacctttaaaacatactagagctactccttgatgaatacgag

SEQ ID NO: 4964 - DNA, 200 bp, Lawsonia intracellularis
aggatataatttctgcctttttaggtaatgagttacttttttgaagaaagacttcacctaaaaaaacatcaatagaatccgtataacgtattaaacggatctcacccttaataccatgaggacgagataatactccgacagctacaagctgctctgacatatatgtagattattccaagatttcaagcattgtgcgtttt

SEQ ID NO: 4965 - DNA, 200 bp, Lawsonia intracellularis
tgtgctttagatgatgcggcacctagaagggtacgaatagcccttgctgtacgaccttgtctaccaataacctttccaaggtcttcttttgcaacacgtaattcaagaactgaagtttgttcaccttccacttcacacacctgcacttcttcaggattatctacaagggatttggcaacaaattctacaaaactttttaa

SEQ ID NO: 4966 - DNA, 200 bp, Lawsonia intracellularis
catactaactctgttatttctcaaaagagaggttaaggaatgaaaaccatgtgtaactacacaaggcaaaactagatattatacattaactttactatatgctttaataatagagcgtacagtatctgaaggttgtgcaccaattgacagccatttttctactttttcgacatcaaccttgatagctgatggatttgttt

SEQ ID NO: 4967 - DNA, 200 bp, Lawsonia intracellularis
gaggattatagtatcccaaatagtctaatggacgaccatcacgacgagtatgactgttgattgctacaatacgataaaatggacgttttttattacccatacgggtaagccttaactttacagacatattaaattctcctaacttttatgatatataactctcaaaaaaagaacaagaaaaaatacattaagaattaata

SEQ ID NO: 4968 - DNA, 200 bp, Lawsonia intracellularis
aaaaaattaataggttactattcataataaaagcagcacttcataataatataaaagagctattttctttttttattcttatgtttctttttttcctttttcttttttgttgcagattttccactaccattcactccaccaattgaagttgaacgcaggacaggtcttccaaacagtccagggatacctggtaatgcact

SEQ ID NO: 4969 - DNA, 200 bp, Lawsonia intracellularis
aaaacctattcctccctcaccaaaaaatgatcctaatccaaaaccaccttctcctgattctgcattcttcataagagaattatctgagacaactctctgcatcatttgcttcatttgatcaaatttctgaattgtttgattaactttattaagagtaacaccagcgcctctagcaatcctttgtcgtctacttgtattta

SEQ ID NO: 4970 - DNA, 200 bp, Lawsonia intracellularis
acaaatctggatttcgacgctctttaattgtcatagagttgataatagcttctgtataagaaaattcatcttctggaattgcaacacgaaatttactaacagcagaaccaaatccagggataagtttcattaaagaacttaatgaacctaattgtttcattcggcgtatttgactaaaaaaatcttcaaaattaaatgtt

SEQ ID NO: 4971 - DNA, 200 bp, Lawsonia intracellularis
gctttctgaattttttcagtaatagctttaagctcatcatcttcaaacgttgactgggctttttctataagtgtaagcatatctcccatgccaagaatacgtcctgctatacgatctggatgaaagacttcaaagtcagaaagtttctcaccggttcccacatacttaactggcacaccagtagatgaacaaatagatag

SEQ ID NO: 4972 - DNA, 200 bp, Lawsonia intracellularis
tgctgcacctccacgtgcatctccatccatctttgtaagaatggcacctgttaatgaaagctttttattaaactcctctgcaacagttacaacatcttgacctgtcatagcatctgcaacaaaaagaatttcttgtggatgtgcaacaagttttatatctgtaagttcttgcattaatggttcatctatatgtaatctcc

SEQ ID NO: 4973 - DNA, 200 bp, Lawsonia intracellularis
cggctgtatctaacaaaacaactgtatactctttttcttttgcttcatgcagcgcagcattaataatatctaatggcttcattgccgcattagatgcaaaacatgggatattcagttgcgttgccaaagtttgtaattgttcaatagcagcaggtcgatatatatcaacaggaactaagtatggacgtaatccttgactc

SEQ ID NO: 4974 - DNA, 200 bp, Lawsonia intracellularis
tgtagtaaagaagcaagctttcctgtagatgtcgtttttcctgaaccttgtaacccaacaagcataataacacttaggggaaaatgcgttacatctaatttggtcgactttcctcctaataggttaacaagttcttcatgaaaaacctttataaactgttgtgcaggagtaagatgtttttctatagcttgtccaacaac

SEQ ID NO: 4975 - DNA, 200 bp, Lawsonia intracellularis
tttctcttttacatgctcaataaactttttaacaacgttaaaattaacatcagcttctaataacgctaaacgtacctcacgtaatccgtcacgaatattatcttccgtaagttgaccacgtttaccaatcgcatgcaatacactggataatctttcagataaactttcaaacatagatatctccaatcttgaactgcagg

SEQ ID NO: 4976 - DNA, 200 bp, Lawsonia intracellularis
atcatagataaaaagcgttactttttgttgccttaaaagtcaatagaatgctattttttctattacaatataaaaaattaataataatttcatatggttaactaacattgttaagagaatgcattattatacaacaaatatgaaacagtttctacatgtggtgtatgaggaaataaatctacaggttgagtctgctgtat

SEQ ID NO: 4977 - DNA, 200 bp, Lawsonia intracellularis
gacaaaatgaggacttagcatagcaatgtctcgtgcaaaggtcccaggattgcaagacacataaatacagcgtcgaggagcaaggcggataagcaattctataacttttttatctaaaccagcacgtggaggatctacaataactatatcaggagtaatacctttttgtatctgtgaacgaataaaactaaatgcatcat

SEQ ID NO: 4978 - DNA, 200 bp, Lawsonia intracellularis
cttgtataaaagaacaattagtatagcctaaagataaacgatttttattagctaaattaatagatgcagcaattgactctactcctatcacctttaaagaaaaaggagctaaaaaaagagcaatagaacctactccagtgtataaatcccaaacaagttcttttcctgtaagttgagccatggaaagaatttttgagtaa

SEQ ID NO: 4979 - DNA, 200 bp, Lawsonia intracellularis
agaatttcagttgcttttgtatttatttgaaaaaaattatcattccccctagataatacaatatcccctacttgttcctctaaaaatcgttctccctcatgccagattatatattcactataggctatatctgaaacctgagtcctccgagacaatataataccttttatagcttctactccttttagacactgagctaa

SEQ ID NO: 4980 - DNA, 200 bp, Lawsonia intracellularis
ccttttacctaatgcctgttcatcaaatttattctcaatcaatgtattttttttatttacaataagctcgacaaggatatcaccagttattgtctctcgaataataagaaaacgaaaatattttaatgtaagtatctttttttctaatgatgtctgttcgtgtctaacccaatgtcttactatctctactattttcatag

SEQ ID NO: 4981 - DNA, 200 bp, Lawsonia intracellularis
tatttttggactgaagcaaacaatctgtaactggaatgacttcatgagaatcaactctttttaaacctaataatactgtacttagacaaggagatggagcaaacgcaaagaccatcttattacgatatctccactcacatggagaaggtataacatctaatattactggattgttcactttacctatacgttcaagagca

SEQ ID NO: 4982 - DNA, 200 bp, Lawsonia intracellularis
tcttgtattatttgtttcttccaaataatttgatgtttatattgaatatgctgccatgtacaacctccacattgtattgcatgtatacatataggttctctttcatacttcgaaggttttattatctgtttaacttctccttctaaaaactttgagtgtacagatgtgatattaacaagaactttttgaccaggaactgt

SEQ ID NO: 4983 - DNA, 200 bp, Lawsonia intracellularis
atgaggaacaaaaacaaccttattttcaaaacgtccaagccctcgaccatctgaaacaatagatgtaatatctaaaacaagttgatgttgaagataattcatatcctttttattattgttcactataaaacttaacctactttttaatataccaagttttatcgttcattattctgttctagtaaactaaataaatattc

SEQ ID NO: 4984 - DNA, 200 bp, Lawsonia intracellularis
accatattcattcttatgcatgggctctgcaagtttttttaattgaacatcatcaatataccctttacgccatgcaatttcctcaatacaaccaacttttgcaccttgtctctcttgaacggcttgaacaaaggctgctgcttgatgcattgactcaaatgttcctgtatccaaccaagcaactccacgcccaaaaattt

SEQ ID NO: 4985 - DNA, 200 bp, Lawsonia intracellularis
caacagaaagtccactgtcttgaagatatatattatttaaatccgtaatttcaagttcccctcttgcagaaggtttcaatgatgctgctttatttgatacgtcaccatcataaaaatataatcctgtgactgcataatgtgattttggattttgaggcttttcttcaatagttaatactttattattttcatcaaaagaa

SEQ ID NO: 4986 - DNA, 200 bp, Lawsonia intracellularis
acaataccatatcgttcaggatcttttactctataagcaaaaactttccctccatactcaaggcctgtacaatcttcaagcatacaatataacttgtctccatgaaacaaattatctccaaggacaaggcaacaaggttctccagcaataaaatttcttgctaatataaatgcctcagccagaccattaggaaatgattg

SEQ ID NO: 4987 - DNA, 200 bp, Lawsonia intracellularis
ctttatatacgttaactgaagccctaactgtgaaccatcgccaaaaagatttataaagtcctgttgatgatgaggcgttgtgataaaacaaatttcacgtattcctgcttgcataaggatagataaaggataataaaccattggtttatcaaaaataggtattaactgcttgcaaactcccctagtaatagggtaaagac

SEQ ID NO: 4988 - DNA, 200 bp, Lawsonia intracellularis
gtgttcctgagccacctgctaatataattcccttcatatcacctccaacaactacatgaaaaacataatctaatactaaaatcaaatactaaaaacatattttgactcacatatgatgcatattttttttacataaagtactaattgtatatatagtattaatcactttactggagtaaacgttatggatcttattttaa

SEQ ID NO: 4989 - DNA, 200 bp, Lawsonia intracellularis
ttaaaagagcaatcttaagtgtcactcaaaaagatggccttatagaattagctacctttcttcataaacataatgtagagcttgtttctacaggaggaacattagctacattacattcagcagggttacctataactgctgttagttctgtaacaggattccctgaaattttaggaggacgtgtaaagactattcaccct

SEQ ID NO: 4990 - DNA, 200 bp, Lawsonia intracellularis
aatattcatgcaggaattcttgcagataaaaacaattctgagcataccaacacattacaacagttaggtattcaaccatttgacttagtttgtgtaaacttatacgaatttgaaaaagctttaatgaaaaaatttaatccatatgaaatggtcgagaacattgatattggtggtccatgcatgttaagagcagcagcaaa

SEQ ID NO: 4991 - DNA, 200 bp, Lawsonia intracellularis
aaattttcatagtgtactagtattacctagcccaaccttttactctgaagcaataaaagaattatctataaactctatgtatagctctctaaccttccgtaaaaaaatggcagctgaatcttttaaaataacttcacaatatgatactattattgcaacatatttagaaaataattagttcaaaaagcttgttatctatc

SEQ ID NO: 4992 - DNA, 200 bp, Lawsonia intracellularis
ttagataattatattaaaccgttataaatttttttgactgtaacttaataatatctaactgcaagactacaaccagaatttttatacctaaagaacaaaaggttaactaaccattggtagcctatatttaaattataataataaagaaagattaaactatctaaaactataatacacaacaaggcatagttatatgctcc

SEQ ID NO: 4993 - DNA, 200 bp, Lawsonia intracellularis
accataatgaatacacgaatcctctcaatgtagtatgtgggattttatggcgtaatgaacgatttttagctactcaacgaccagtaaatcaaagccatgcaggatattgggaattccctgggggaaaagtagaattaggagagacactacacatagctcttaaaagagaacttaaagaagaattaggaactactatcttt

SEQ ID NO: 4994 - DNA, 200 bp, Lawsonia intracellularis
tcacctactttctattgcaaaataaatcataattatggagtaacaccacttcttatccacttttttcaaattacagtatttgaaggtgaacctactccacttgaaggacaaacattaagctggattacaccaaaagaagccaacaaccttcaattcttagaagcagacaaatttttactccaacagttacaacaacggta

SEQ ID NO: 4995 - DNA, 200 bp, Lawsonia intracellularis
gagtgaaatactatagtactcttataacatagtgttataatcaacactatgttataaattttttgtagataataaaagaattatctaccctcttatataagctatgctatgaggtaatacgacttataccactctacaaacttcttaattccatattctataggagtattcggagaaaaatctacatcatgtttaagatc

SEQ ID NO: 4996 - DNA, 200 bp, Lawsonia intracellularis
atctatatctgcccatgttgcttcaacatcaccaggttgcataggtaagtattcctttatagctttcttacctaactctacttcaagtacttctataaactcactcaactggacagtattattattaccgatattgtatatcttccaaggagccttacttgaagaaggatctggagaatgactattccaattctcattta

SEQ ID NO: 4997 - DNA, 200 bp, Lawsonia intracellularis
tcttaggagtttttttcatcactcgaataactccctcaataatgtcatcaatatatgtaaaatctctcctcattcttccttcattaaatacactaataggttcaccagaaagaattgcctttgtaaaaaggaacaaagccatatctggtcttccccatggaccgtatacagtaaaaaagcgtaatcctgttgatggtaga

SEQ ID NO: 4998 - DNA, 200 bp, Lawsonia intracellularis
ttatataaatgactataagcatgagccataagttcattagctttttttgaggctccgtataaacttataggatgattagtaccctgatgtactgaaaatggcattaacgtgttgagtccataaacagaacttgaagaagcaaaaactaaatgttccacttcagtatgacgacaacattcaagaatattcccaaatcctac

SEQ ID NO: 4999 - DNA, 200 bp, Lawsonia intracellularis
aagattagattggatataagatgaagggttttcaatactatatcgtacacctgcctgtgcagctaagttgacaacatgactaaatcggtattgtaaaaaaagctcttgaaggttaggtagatttactatgtctatagaggaaaatgtaaaattaggctcatccattaaaagtgccaatctatcttttttcaaagtaactg

SEQ ID NO: 5000 - DNA, 200 bp, Lawsonia intracellularis
aataatagtcattgagattatcaatacctacaactgaatgcccttcatcaagtaatcgacgacataaatggaaaccaataaaaccagcagcaccagtgacaagcacattcatactataaatctcctatagagtatgtaaactttgaatatgtttttttaaaaaacttagaagttgactgtaatacatttcattccctatt

SEQ ID NO: 5001 - DNA, 200 bp, Lawsonia intracellularis
aactcatctatatgttgtgtagttaccatatatctaccccagcatatttgaggaacaaaaagagaaaagttaggtaatcctagttgatttggagtaatacctgtcataaaaataacccaatttggcttaagatgctgtacaccactcataaacatttgcatattttcaaaggaggttgcatgatcagggaataaacataa

SEQ ID NO: 5002 - DNA, 200 bp, Lawsonia intracellularis
aggccaaaatgcatggcttcctttagctaaagacaaatctttaatgagtcgatgtaataatcttcgacgatctggatttgcctctccccccaagtcataccctaactcttcatatgtccaaagtataaatggattctttggagtcctactcaaaatatctttccaagcaaacggccacttatctaacgggagtaatggta

SEQ ID NO: 5003 - DNA, 200 bp, Lawsonia intracellularis
cactattttttgtatgtgtaacttgatgatgccttactttcactgcatcagatgagttgggctgaaatgatgggatagtattactattatcttttaatttttctttctcaaaagaaggtgattgaaatttattattataattctggtcactctttaataaagaaattaatgcttcattttctattaataaatgtgtaata

SEQ ID NO: 5004 - DNA, 200 bp, Lawsonia intracellularis
cccgcctgtctccatggacgaaatatccctattacacctaaagagacttgatccatgaaagaattctccatgcaatatctgttttagtcatagcttcccaacgagcttcatgcccattcctatctaagataaagacactgccagatagagatgcaacactatctttaatataatttccaacaatcatatctgccttttta

SEQ ID NO: 5005 - DNA, 200 bp, Lawsonia intracellularis
acatataatttattctgtacagcttgttctaacccttcagattcaagtgcaaaaccaacaactttttggttacgagctttattattagaaagtttttgtaatatatctgtatttctaataaatcgtagtgtaaatccatcaccagcttcatcttttttaaatttaccttcaggacctttttctggcgaaaagtctgctac

SEQ ID NO: 5006 - DNA, 200 bp, Lawsonia intracellularis
tgcagcaacaaaaattcctatatcagaagttggccaaatactttctgcaacttcaaacatttgtaaagctgtagtaacagaataacggtgaattcctaaaggtaaccatggagagcctggcccacaaacagcatgaacttctgcacctctcatccaggcagcaacagctattgatgcacccataatacctgttgcaggat

SEQ ID NO: 5007 - DNA, 200 bp, Lawsonia intracellularis
tactccaaaatctcaatccatcccagggttctcgtgtaggacctagtgtaataagtatacgtaatcctgcaaaatcttgtggtgttatagacttaaggcctataagataaatatctctaagatctgccaggcgaccttgaccttcatctccacatgcaacacgcccttgctctggttcaataacaatacaccctcgatct

SEQ ID NO: 5008 - DNA, 200 bp, Lawsonia intracellularis
tgaagaatttttatattttgctgtgttgaaggatggttccacatatttggattcattgcaggagcaataataggctgaccagaaaatgctaaagcttgacatgcaagtaattcatctgcctgtccatatgccaaccttgatatagttgaagctgaagcaggagcaataataaaagcttgtgctgttttcccaggttcaag

SEQ ID NO: 5009 - DNA, 200 bp, Lawsonia intracellularis
atgtgagtatggatgacgaatatcatcaaacatcgttgtgtaaacaggatctgctccaacagaagaaaaagctaatggatttaaaaagttacaggctgcaggtgttagtgtgacactaacagaaagacctacatctttccaagctcgtactaaatcgattgctcgatatgcagcaattgacccacaaacacctaaatgta

SEQ ID NO: 5010 - DNA, 200 bp, Lawsonia intracellularis
tctgtaataattcctgacaatgaaataaaaggtacttgtctatcattcgttaagtcctttctctcctaactctgtctcaaagtcacctataactccatgtgaagaataaggtgaatcttgacttattattgtttctctcgatagatttaattgatatgcaccatcatctaatcgagctaatacccaaacctctatagcag

SEQ ID NO: 5011 - DNA, 200 bp, Lawsonia intracellularis
tagtcaactgctgattataaatatataatatagcataacgaccactcttttcatagagctgaattgttcgtttcccgtctataacacctctaagagtccatccctgacgagacatattatgtatcatagcagaacaaagagaagacctatcaacccttccttcaaacgtaagtagtcctattttttctccatctggccct

SEQ ID NO: 5012 - DNA, 200 bp, Lawsonia intracellularis
acagaaacaagtgttcggttatgatctatactcatactctttggaatacaaatatctgggaagcttccataatacacatcgtctacatgtgcagttgaactagaaaaaggattgctaaaactagaaaagtcaaacttagaacaaccaactgttattatgcataaacaaacacaaaaatatattctcaacattaagatatc

SEQ ID NO: 5013 - DNA, 200 bp, Lawsonia intracellularis
tcctcaataactatttagaaatatagtagagtaaaatatagtagaataaattaaattggaataacataaatacatatcataacaattgctttatttctatgaaatagggatatcagttactcttaataaaattgaggattactaaaatatccttaaaagtaattctttacataaaatattaataagaagatttaataaga

SEQ ID NO: 5014 - DNA, 200 bp, Lawsonia intracellularis
aatacctgaggacattatttgtatttagtatacttaaattggatttaactaactcttaaaaaataacttcagagtatgtgtcatatatatcaaaaaaagtaaaagttaaacttactaattaatatataaaaatttttcatttatcttataactaaatgttatccttaactaaaaaatatagcttattttactatatatat

SEQ ID NO: 5015 - DNA, 200 bp, Lawsonia intracellularis
atatatctgaacaccatgctactaaaaaaacatatctttagttttgaagatcttcttgcatatcctaaaaatttacggcaaatacattgtaagacaactctattggcactcctttaacaataggtattagcttatggatgttcaaaagataaaagaacaacttagtcgtatcaagctctactactcacgtaacgaaacaa

SEQ ID NO: 5016 - DNA, 200 bp, Lawsonia intracellularis
ttagagctcttggtgtagctgtagcaggtctcaaaggtatcgtaaagtctagcacgccaccacctacagaattacgcagccttttaagggaaggttctcaactactattacatgatgcattaatacagaaatatttgccagcccctataacttaccaacctggccaggaaaaacaactctttactgttttatcagaaaca

SEQ ID NO: 5017 - DNA, 200 bp, Lawsonia intracellularis
tacaaaaaaattattgaagatcaagaaaaagaaacatacttaaaaactagagaaagaaagcaatctttagatcaagcttttaaccttgggataaaattactagaacaaaaaaaaatatctgaagctgataaagctttcacagaagcattaacatactataaggacgaagaaagactcttttatcttattgctaaagcgct

SEQ ID NO: 5018 - DNA, 200 bp, Lawsonia intracellularis
tattaaatctcatgaacctacacgtgcatttgactatataaaaaaagggcttacttttcatccaactaataatgatcttagcaaactatatgatatcgcaacacgcctaaaagctggtgaaacatctgcactagatgaactataaaataaatattctaccatgaactaatctcacctagctatatattatacaaaaaacc

SEQ ID NO: 5019 - DNA, 200 bp, Lawsonia intracellularis
atgcaaaattatccattatgttttatacatgcatctgatctccatctagatactgtattttcaggtctgtcaaaagatattccttcaaacttagctacaatacttcataactccacttttgtagcttttaaccgtcttatacaattatgtattacacaccgtcctgactttctattactttctggtgatatctataacga

SEQ ID NO: 5020 - DNA, 200 bp, Lawsonia intracellularis
agaagattatagtatccgtgctatccttacattaagagatggctgttacaccttagaaaaagaaggaatacaagtctttattgttcatgggaatcatgatccttactcctcaagaatgaagtctatcacttggcctaaaaatgtcactatttttgatacagaggtaacaaatgtaccctatacagccaaagatggtacac

SEQ ID NO: 5021 - DNA, 200 bp, Lawsonia intracellularis
tccttgctcgaatatatggtataagtcatgcttcaaataaagaaagtaagaatcttgctctacaattccatcgaacagaagatacatgtttacacatagctatgcttcattgcactgtaggaagtccacaacactatgatagatatgctccttgctcaacaaaaaatcttatagatgcaggcatggattactgggcactt

SEQ ID NO: 5022 - DNA, 200 bp, Lawsonia intracellularis
ggacatgttcatgaatatcaagaaatttcacaagatccccttatagtgtaccctggatgtacacaaggccttcatatccatgagcaaggagaaaaaggatgtgtccttgtcacaactaaacaacaaggctcaaaacttactctatacaaaaaattttatacacttgggccagtattatggcacacacttactattcaact

SEQ ID NO: 5023 - DNA, 200 bp, Lawsonia intracellularis
tggagatactaaccaacctactcttcaagaagatatctctaacacactatcccttgattatatagaagatacttttcataatgctcttaatgagcttatagctacatttactcctggctggcagatgctcattcttcgcctttcttttacaggttgtacatcacttgatcctctgttaagatatgggaataatctgaatg

SEQ ID NO: 5024 - DNA, 200 bp, Lawsonia intracellularis
accttcttgaaaggctaagggatgtagctagtagctcccaaccagtttggattaaagacattcaactgttaaccacatctccaaagtattatcatgaacttttagaaagagaagacttactaggtgaagttgtacgactttcaaaatcaattaatgaattagaaaatatagaacaaatacatacaacagctcttgctcca

SEQ ID NO: 5025 - DNA, 200 bp, Lawsonia intracellularis
ctgttttcacatcataaacttcggaaaattcttaactatcctaaccagctagaatttaaacaacttttaacagaagctgagcgtctttgtgtcgaacttttagagaataattaatgcgtatccactccttccatatagattcgtttggattctttcataaccaaacaatttcaaatctttcaccgaaattttctattttt

SEQ ID NO: 5026 - DNA, 200 bp, Lawsonia intracellularis
cttggaaacaatgaagcaggaaaatcaacgcttttggacttttttcgtcttacacttatgggctatccacaaagaaaaaacaatcgtatcaaaaactatctaaatggacatggacttcaaggaggaagtttagttcttgatactaactatggtaatatccatatcactcgacgtcctaataaaggaccagtaattataga

SEQ ID NO: 5027 - DNA, 200 bp, Lawsonia intracellularis
tcaacatggaacccccatagatattacactatgggaacgcttattaagtggtattacccctgaagtttatacaaatatctatggatttagcctctcagaacttcaatcatttgaaacgcttagtactgataatatccggaatgcactctatggagcaagttttggtactggtttacagtccccaagtgaagttatcaagt

SEQ ID NO: 5028 - DNA, 200 bp, Lawsonia intracellularis
cacttgataatactatgaatgaactcttcaaacctaaaggttcaacacaacctatagctgaacacttacatgactgggaagagattaacaaacaacttatagaagccgaaaaagaagctgcaaactacgataattatgcacttgaattaaaaaaaattacattaaaccttgaaagtctccattctaaatccaaagaatta

SEQ ID NO: 5029 - DNA, 200 bp, Lawsonia intracellularis
gaacaacaacaataccatttaaaaaaacgtcttgatatttggcatcaatgggaagaatggcgccttatacagacacgccttgaacaccttcctcccatatctgcatcatttccacaagatggtgcagctagaatggaacgtgcactggaaaaaaaagaacatgccgcacgtgaagttacccttgctagaacccgtcttaa

SEQ ID NO: 5030 - DNA, 200 bp, Lawsonia intracellularis
caatacactgaataaaattcaacaatgtcatataaatcatgacatattgtgtattcataaagaacttcaaactattgctgaacataaatcaacctataaaacagcccttatagatattcctgccttagaagcaaaactacaacaaacaaaagaatctcttaaccaagaattattaatacttggtaaaaattggtctattg

SEQ ID NO: 5031 - DNA, 200 bp, Lawsonia intracellularis
aaaaaataaacaaaattgatcgctctatatctgtacgtgaaaaacttgaacgcctttctgttgaaatagagctaactaaagaagcatatgatgctgcagccacagcatataataatatatgtgaagaattggaagttgcaaaacaagaagaaatagaaaaacaaaaaatctatgaatctcttccttcattacagactgtc

SEQ ID NO: 5032 - DNA, 200 bp, Lawsonia intracellularis
cttagtgatacaaacaaagacatccttagtcgtatgcttatacagatagaagaagctgaacgttatttaccagagaaaaaaagtcgctataattctctttatgaagatttcaaaaatcttttaacccaatttcatttacatcctaaatataataaaatagagacacttctaaagctgttaaatgaacaaaactctgctat

SEQ ID NO: 5033 - DNA, 200 bp, Lawsonia intracellularis
agaaatggttaacaccatccaagaaaaagcattagaagaaatacaagctaataatttattaactcaaactaaacaaaaggtggaccaactaaaactccactcaaaacaaatagaagaacagatccaacagttaggggatgttgatacaaaagatattgtttcaatctattctcaaataaataccttacggacattactac

SEQ ID NO: 5034 - DNA, 200 bp, Lawsonia intracellularis
acatcttttctacagaaaaaatacgtgctgaagaaatagaagattattatcaactacaagttgcaaataataacttcaataacaaaagctcacggtctattgtaataggaattctttctagtcttattggttgtggaatatttagtattcaacacttaatgaatagtaatatattgcctatttctcaaaacataataatc

SEQ ID NO: 5035 - DNA, 200 bp, Lawsonia intracellularis
ctgctacctctatggtctggctacttctttttaagttcaggaattgtcattatcttaaaaaaactattctataattaccttccactaactaaaaattctactattacaaaacaattacatacacgacatgaaaaggctctatccaaatgtactgaacttcaaaataaaatttatactatttgtaatgagctgcgtataga

SEQ ID NO: 5036 - DNA, 200 bp, Lawsonia intracellularis
aacaccctctttagaaaatattgagaagttaaattaccaaatagaacaaaaaaaagaattatatgataagaaagaacatttaaagcaagaacataataaatatcaaaaagagattgaatcactttatcaacaaatagatgtggctaaaaaagaacatgagcaaaaactagcagatgttattttagctaaaaatacttggt

SEQ ID NO: 5037 - DNA, 200 bp, Lawsonia intracellularis
atgaatatgttttggagtttggaatacagtttgttcctaaaccagaacaagttactgcattctttgcacgtgtagaaacagcatgtaatttatggtctactatagaactattgaataatgatattgctgaacttgaatcttattacaaaaattttaaaaactttgtaaatcaaaccttaggggagtatctttcttctatt

SEQ ID NO: 5038 - DNA, 200 bp, Lawsonia intracellularis
gactgtgattctataccggctttgattaatgcagtaaaagatatcttaacttctcatcaagacgatgaattaaataatagctatacacaagctttagaagatttacagttagcacaagcacacactaaataccttatagattacttacaaaaactaaaaatacagtatgaacattccaagactaaatacgataagacttg

SEQ ID NO: 5039 - DNA, 200 bp, Lawsonia intracellularis
ttcagcctggagcaacaatctaagtaatcttatgttggatcctaacttggcgcctgatgcaataaaaaatatgttcaaacaaatggatcatattgcattgttaaaccaagagatgataaaaatccaaaataaacttgaacatcaacaaaacgaaaaaaatgcttttgttctcccactaaaacacctttgtcaacagttag

SEQ ID NO: 5040 - DNA, 200 bp, Lawsonia intracellularis
gctatactccaaacagtgatgactggattacagttcttgatcaactccttaaagatgcaaccaatgccacattaatatctaatgaaaagaaaacacttgaagaacaaaaaagcgaatatgaaaatgaagtaaaatatactcaactcatcctcgatgacgcaaaccaatctgtctatagactactccaacttgccaatgta

SEQ ID NO: 5041 - DNA, 200 bp, Lawsonia intracellularis
gatgatacagagactttctttcaacacgatatcattaaacaaaaacaagaagagctttataagcagcaagaagaaattgaagctattctaagattagctgctaaagatatttcttcctacaaatcctatcctgatttcaatatgtttttacaatcattttctgaaatagaaaaaaaagatttagaagtagaactgaatga

SEQ ID NO: 5042 - DNA, 200 bp, Lawsonia intracellularis
agtttcatcacgacttattgataataaaaaaagtatagataatttttctaatcaagcacgcacacttgaaatacgtttagaaaatcttatttcatctgatactctatatcaaatgaaagtaaaacaagcttctatagtacattctatgcaaaacattgcaaaaaaatggagttgttatgcgctagcaaaacagcttttaa

SEQ ID NO: 5043 - DNA, 200 bp, Lawsonia intracellularis
ttgaagcaaagtctcactttgaacaggaacgtcagcctgaaattatacgtattgcatcccatatttttagtactattactggagggaaatggataggcatcaactcttcattagaagaaatgtcacttagtatattaccacctcatggagaacctataaagccagagcttcttagtaggggaacccaagaacaactttac

SEQ ID NO: 5044 - DNA, 200 bp, Lawsonia intracellularis
ttggcactacgtcttgcacatatccataatcatgccatccaagcaagtccattacctattattatggatgatattctagtcaactttgatcctgaaagagcaaaacatacaattagtacctttgtagaattaacaaactcttctcaagaacttcatatggggcatcagcttcttttttttacatgtcaccctcatattgc

SEQ ID NO: 5045 - DNA, 200 bp, Lawsonia intracellularis
aaaacaacttcttgaaacaatccctgaaagtaacttatactatatagaaaacaaaaaaattactcttgcatcttgactctaattctatttacttaaaaaatttactaaaactcctatagcctaaactctttaatcattttttcaatagcttcttttgcaagctcctctgtagtaacccacttaccaccacgtttgataaa

SEQ ID NO: 5046 - DNA, 200 bp, Lawsonia intracellularis
tttattaagtgttaaaagattacttgcaagtcctacttgcttctcgctatagtgagatcttcctagtaatgctccttctccttttgtatctataagaaaaaaatctatagtcaactcagcagaagatgtcacacctgcactacttccctctctaggatgccaacttaaaacataaggtataatcaaaaactctacaccta

SEQ ID NO: 5047 - DNA, 200 bp, Lawsonia intracellularis
gttgttttcctacagcaacccaatattctagtgcactattaactccagccatacgtgtaattgtaggatctgcaccatcagctgctggaataaattcatattcacgtttagtttgtgctcttagcgtatctataatcaaagagcgaagttctataaggttttcctctgtagcaaaaccacgatcttctggtatataacca

SEQ ID NO: 5048 - DNA, 200 bp, Lawsonia intracellularis
gctaaaagatctgttgttcccataggctgtataggtcctacaacaccaattgttaccttaggtaatacttcaggaatttctacaagttgttgcccacaagccccaagtaaactacttgttatcattaggataaatcctaactgtatcactttattcataaatttaacactcctcaattataccccataattttgataatc

SEQ ID NO: 5049 - DNA, 200 bp, Lawsonia intracellularis
taaattctatcctgcttactatctatctattgttagataaggcttggttcaatataattctctaaagtaatttattgactattttcttttttctttgtgtcctgctgacaatgcaacaacccatatactcaactcgtataatatcaacataggaatagccataagtatttgagaaaaaacgtcaggaggtgtaagtatag

SEQ ID NO: 5050 - DNA, 200 bp, Lawsonia intracellularis
ctgctacaataaatactacaagaatagcatacttacgtatagaacgcattttttcagcattaataaggttcattttaccaagaaaaaatgcaaataaaggcatttcaaaaataagaccaaaagcaactaacatcttgagagaaaaagacaaataattactaagagatggcattgctacaatagtatctgtagaatagctc

SEQ ID NO: 5051 - DNA, 200 bp, Lawsonia intracellularis
ataaaaaaaacaaaaacaaaaggaaagacaaaaaaataacaaaatgccgcacctcctaaaaaaaatgcagctgaacatatagatagtggcaaaatatactttttctcttcatcataaagccctggggatataaataaccatatttggtaaaaaatataaggactagtaataaacagtgctgcaacaaaagctatcttaag

SEQ ID NO: 5052 - DNA, 200 bp, Lawsonia intracellularis
atatacaaaaaaaccctcagggacactagtaaaaatcaattttgtgtctgctggcattacagttattaatgggagagcaagataatgaaatagtatatctgatatactataacatgtgataaatactactccaataacaataatacacttagtaagccttttccttaattctgataaatgctctaacaaaggcattccat

SEQ ID NO: 5053 - DNA, 200 bp, Lawsonia intracellularis
atggtttctcatcatcatcagacattgttggaggtatccctccaccattattgtttcctccatttccacttgcagttattatgagcgatgtattatttactggaggtgttatacctggaagatatgcctgctcttgttctccatgcatactttctacaaatttttcttgtgagctatctaataacatattgctatcagta

SEQ ID NO: 5054 - DNA, 200 bp, Lawsonia intracellularis
tcttttattgctccagagtcactcatcatattatcttgtattgaagactcttttttcatatagatgccttctcagcctgctctttattaagagaatgtttgccatcatccttatcattagaagacacaaatgaagtagatagtgtgtcgcttgtagataaaggactttcagatattgttgtctcattattatctacatta

SEQ ID NO: 5055 - DNA, 200 bp, Lawsonia intracellularis
ttttttacactacttacggtgttacctgctttaactttcttttcatgctcttcaaatgttatctcagtattaagagtatgttgaaattctgaagaaacttgcctaaattctcttaaagcttttcctaatgtccttgcaatttggggaatactttttggtccaaggactagtaatgctacaagtaaaattaaaagaagttc

SEQ ID NO: 5056 - DNA, 200 bp, Lawsonia intracellularis
tgtaccaccaataccaaacatacaattttcctaatataaaaaaattgttaccctatttaaactttttgaattaccttccttttcctataactctctttatactaaaggaaaagatagaaaatctataactcataactaaaaagtttcactttaattaaaggtactccagtaaaatataactatactaaacagctaactac

SEQ ID NO: 5057 - DNA, 200 bp, Lawsonia intracellularis
tataaaaagatataataaaaagacctacattgtaatacatatcaagtcaacaaagtaagtctttctataaggtatcaagaactatctgtagttatctaatatattactcccactcaattgtactaggaggtttagacgaaatatcgtatacaaccctattaataccttttacttcatttataatccgtttagagatagtt

SEQ ID NO: 5058 - DNA, 200 bp, Lawsonia intracellularis
tccaaaagttgtgaaggtaaacgaacccaatcagctgtcatagcatctctactatcaacacaacgtaatgctatgacattttcgtatgttcttccatcccccataacaccaacagtctttagaggtaaaagaattgcaaaaccttgccaaattcttttataccaaccaaaacttttgagttcttcctcaacaattttatc

SEQ ID NO: 5059 - DNA, 200 bp, Lawsonia intracellularis
tgctttacgcaatatagttaaacgctcttgagtaacttcacctataatacggatggcaaggcctggaccaggaaagggatgtctccaaataatggaatctggtaatccaagctctacagcaactttacggacttcatctttaaatagttcttttaaaggttctataagtttcaaagacattttttctggaagtccaccaa

SEQ ID NO: 5060 - DNA, 200 bp, Lawsonia intracellularis
cattatgatgactctttataacaacacttgaacctctatgagggatagattctattatatctgaatataatgttccttgtgccaaaaagtctacttttccaattgctcttgcctcttcatcaaagacatcaataaaagtatgaccaataatttttcttttttcttcaggatcttgaataccttctagttgtttaaggaaa

SEQ ID NO: 5061 - DNA, 200 bp, Lawsonia intracellularis
cggtcttgtgcttggacaaaaataagatttaaatcaaagtgttcacgtaagtaagaaataacttcatccttttctccttcacgcaacaaaccattatcaacaaaaatacaatgaagtcttttaccaattgcttggtttaatataagagctacaactgtagagtctacaccaccagataatgcacaaacaacgtttccatc

SEQ ID NO: 5062 - DNA, 200 bp, Lawsonia intracellularis
ccctatcgttttctgtgcttgtgtgataatcttttctataaatgaagacatagtccaatcaggagcaatacctactatcttaaaaagaaagttacggataatttgttctccatcttctgaatgagaaacttccggatgaaactgtacagcatatacctttttctcttcatttgcgattgcacccacgttaagtgtgtttg

SEQ ID NO: 5063 - DNA, 200 bp, Lawsonia intracellularis
ttctcccaataactgtaaagtttggaggtggaaactctacagtatcaccatgagacatccagacacgagagaaaggtttatggctaataccatcccaaagaatagagtttccttctagtataaactcagcaggaccatattcacgtgtttgtgaatatgcaagaattcctccaaagcattgagcaataagttgcattcca

SEQ ID NO: 5064 - DNA, 200 bp, Lawsonia intracellularis
taacaaataccaagaataggtacattaaaatcaaagataatatcatctaactgtggggcatcagatgctcctacacttgcgggtcccccagacaaaataatcgctgatggttgtaaagaagctaaaacttctttactaacagtacaaggatacacttcagaatatacacctaactcacgtatccgacgtgctataagctg

SEQ ID NO: 5065 - DNA, 200 bp, Lawsonia intracellularis
agtaaattgtgaaccataatctatcacaataactttattctgcatttgttacctttaactatattaagtcatattgttgtattaaaaatgagtagataaagacaaatttaatagtaaatttaacgatataaaataactagttatatctattaagtaactagggagtatctactcgataattaggggcttcttttgtaata

SEQ ID NO: 5066 - DNA, 200 bp, Lawsonia intracellularis
ataacatcgtgcacatgactttcacgtaaacctgctgaggaaataatcacaagttgagaagtattaaatagtgtttttaaatctgatgcaccacaatatcccataccagaagataaacctccaacaagttgataaattgtgtcggatacaggaccacgataaggaacacgcccaactattccttcgggaacaagtttctt

SEQ ID NO: 5067 - DNA, 200 bp, Lawsonia intracellularis
atttgtgtcctggaagtatcgatcggaactcccatctttcattgcatcaatagaacccattcctctataaattttatatgttcttccctgatagagaattgtttctcctgggctttcttcagttccagcaaaaagactaccaaccataactgtattggcacctacagcaagtgctttaactacatctccagaaaatttaa

SEQ ID NO: 5068 - DNA, 200 bp, Lawsonia intracellularis
ttccaccatcactgatacaacaccgatccatctcccttgcagccttagaacactccattactgctgttacttgaggaacaccaacacctgcaacaacacgtgtagtacaaatagaacctggaccaataccaaccttaattgcatcggcaccagctaatagtaaagacttggcagcctcatatgttgcaacatttcctgca

SEQ ID NO: 5069 - DNA, 200 bp, Lawsonia intracellularis
atgagctgacaattagggaaagaatgctttattacttttacagcatgaagaatattctttgagtgaccatgtgcagaatccaaaacaagaacatccactcctgccataagtaatgcttctgctcgagcctcacaatcagaacccacaccaattgctgctcccacacaaaggcgacctttgtcatctttacatgcattagg

SEQ ID NO: 5070 - DNA, 200 bp, Lawsonia intracellularis
atatttttgtattttatcaatatccttcattgtaagtaatcctgctagttgccctgcttcattaacaaccaataacttctcaatgcgatgcatatgcaaatgatgttttgcttcatctaatgtagttccaacaggaactgtaacaagattttcacgtgtcattacttcgtgaacaaaagtattggagagatcttcaacaa

SEQ ID NO: 5071 - DNA, 200 bp, Lawsonia intracellularis
aacgaacgtctctatttgtaacaatacctataagcgttttatcttgtactacaggtaagcctgaaactctatatagctgcataagttcaagtgcatgttcaactgtatcctctggccgaacagtcactgggtcaagaatcataccattttcagactttttaactttttctacctccatcttttgcctagagatactcata

SEQ ID NO: 5072 - DNA, 200 bp, Lawsonia intracellularis
ttcttatgaataatacctatacctccagctcttgccatagagattgccatagcagactctgtaacagtatccattgcagcagaaataaatgggatacttagcaatagtgatggtgttaaccaagcagaaatatttactttatcaggagtaacctcagagtatgcaggaattaataaaacatcatcaaacgttaacgcttt

SEQ ID NO: 5073 - DNA, 200 bp, Lawsonia intracellularis
ataacgaattttatttgttatatcttgattcatacaaaaacactctgagttaaatagattaatctgacttgtgttattttcattgactaatttctaaagggaaagaatagagaaaccaaaatacatgataacataaaaaaatatctgatataaaaatataattcaacacgctgattgtcaatgtagattacaagttacct

SEQ ID NO: 5074 - DNA, 200 bp, Lawsonia intracellularis
tattagtattaattctaacaagctagaaaataacatttttttaatacattctgtctttggtttaatcttctatatatttaatagtatcatactgtacaaagtatatttaactattcgttattattaataaaataaaaagagaatcaaattatgacagaattacaaaaaatgctatctggctatgaatttgaatctgaaga

SEQ ID NO: 5075 - DNA, 200 bp, Lawsonia intracellularis
taacgaaatttatgaaaggtctttaaaagctcaacgatatataaaaactttaaacgctcttgagccagaaagacctgagcaacaactttcgattttaaaacaactttttaattatgttagtccaacagtacgtctccaaacaccatttttttgttcttttggttttaatattaacattggaaacaacacatttattgata

SEQ ID NO: 5076 - DNA, 200 bp, Lawsonia intracellularis
tgaattgtgtttttcttgactataacaatatcactattggcgaaggagttcttattggcccttgtgtaaatatttatactataacccatccaatatctgtacaagagagaaaacgacttgctcctaataaaaatgatgcaccactctataatgctactgctaatcctgtaaagattggagataatgtatggataggaggt

SEQ ID NO: 5077 - DNA, 200 bp, Lawsonia intracellularis
ggctctattattttaccaggagttgttataggtaataatacaaccattggtgcaggttctattgttactaaaagtatcccatctgatgtacttgctgtaggaaatccatgtcgtgttcttcgtaatcttcatccataatattatatattaaaaaattattcaaaaaagaaaatttctattcatttttctcaatgtaattt

SEQ ID NO: 5078 - DNA, 200 bp, Lawsonia intracellularis
attattattattattattattatttaaaattatggtatgatgtatttctatcttgatataatgtatcctaactataatatataaatataattatattattcttatagttaacctacattattgtactctaatattactatgaattttatctttttttcttctattattgttatttattgtttagctatttttactgccgc

SEQ ID NO: 5079 - DNA, 200 bp, Lawsonia intracellularis
acaggcattactccataaaaaagactcaaaatctgcatttggatggattgctataatttttatgctcccaattccaggaataatcttttactggctatttggtattgctcgtgttgatagtcgagcaagtcttttgatgggaaaagcagcttataaggtcttaggtgggaaaaaagatctccatactggcttttttgtta

SEQ ID NO: 5080 - DNA, 200 bp, Lawsonia intracellularis
aggatcctcaaggattcattgatagcaaaactcttcctgtaaatatagcaaagctatctatgccaggacaaaaaatttctgatcattatgttgtaggaggaaataatgtctatccactttataatggagaagaagtataccccaaaatgcttgaagctatttcaaaagctacccatcgagtatatctttctacatttatt

SEQ ID NO: 5081 - DNA, 200 bp, Lawsonia intracellularis
tttgggaacgactttgttggaacactctttataaaaactataaatgaagctgcgattaggggatgtgaggtaaaaatattacttgatggtattggctcgttcttccctataaaaagttggagggaaaaattacatccagcaattaagctagcctatttcctatcaccaagcttactacctcccaaattatctataaactt

SEQ ID NO: 5082 - DNA, 200 bp, Lawsonia intracellularis
gcgtaatcacagaaaaattcttgtatgtgatagcaatattgcattcactgggggaatgaatatctcacaacatcacttagtaactcttaaaaagtctaaccgtgtccaagacatacatttttattgtgcaggcccaattgctaaacaactcgagattgcatttctattagactggagtttcactacaggtgaaactgctc

SEQ ID NO: 5083 - DNA, 200 bp, Lawsonia intracellularis
gtatcccttttgatccaataaaaaaacaaggatcaacactatgtcgtttaattattgatggtccaggctctcctcatgaaacaatccatgatttattctgtgctatgagttcatctgcacaaaaaaatatccgtattatgagcccttattttttgccaacacctcaactaagcgaagctttagcaagtgcagtattacga

SEQ ID NO: 5084 - DNA, 200 bp, Lawsonia intracellularis
ggagtaactgttgatattatcattccattaaaaaataatcattacttactacagtgggcaatggcccatcaggctcctcaacttgtagataaaaatatacatctctttttacaaccaccaccctttgcacacacaaaactcttacttattgataatgattatacattaatgggatccgccaaccttgatccacgaagttt

SEQ ID NO: 5085 - DNA, 200 bp, Lawsonia intracellularis
aaatcttaactttgaacttgtagtagaaaattttagtacaacacttactaacaatttaattgaattctttgataaaaaaaaatctcaatcctaccaactgactgaacatacaaaactaccgtctctccccatacgattacgtaatgctgccagctggctcttttcaccctatctataacattacctattattctttaaca

SEQ ID NO: 5086 - DNA, 200 bp, Lawsonia intracellularis
ctattgtcctttctgatgtaaagaagaactttttttctttctctttctaaaagaactattgctacttcttaccttttctttttgcctataatagttccttgccttagtcctaccttttttaatattttctccactagtaggttgcatcatatgtaactcaaactctatttctaaccttaatatattcacagaacttactt

SEQ ID NO: 5087 - DNA, 200 bp, Lawsonia intracellularis
taacagttagacgttgtcctaaataaaaacgttttcctgtccttacaccaagaagttcttgtctatcctgattatactcaaaccaatcatcctttagcgatgcaagccttaccataccttctataggcatagatattaattccacaaaaaaagcaaaatctgttattcctgtgacaatagcttcaaaaattttaccctca

SEQ ID NO: 5088 - DNA, 200 bp, Lawsonia intracellularis
tctccttgtaggacaagacaacttaaccgcttagtaatttctctctctgcctcttgagctacacgttcatgtgaattacactgttctgcaatactaaaaagctgttgcccaaagggtatatgtttctgagtatctcctaaagcaaacttaacagctcgatgcacaagtaaatctgcataacgacggataggagatgtaaa

SEQ ID NO: 5089 - DNA, 200 bp, Lawsonia intracellularis
atgacaatataaaggagatgctaagccaaaatgctctccaggttcaggagaatattttgcctgcatcattgaacgtaataccatacgactaatcaaaaatgtctgaggagtattttctgcttcttccaaaataccccccaacttctttgcatcaggactacctgacaattggcaagctaagtctgtagtcgctaatatcc

SEQ ID NO: 5090 - DNA, 200 bp, Lawsonia intracellularis
gaaaaagtttttctagacgctcaatatctggctctgggtgtatacggtataaaaaaggaatttgtttatcatgaagaaatgtagcaacagcttcatttacagctaacataagctcttctattaattgatgagaaaaaaaacgttcttgacgtataactcctatgactcgacgggttgctttattaattaaaaaacgtgtc

SEQ ID NO: 5091 - DNA, 200 bp, Lawsonia intracellularis
tctggaagatcaaactctaaacttcccctttttatacgattagcttgtaatactttagctaactcacttgcattattaagcattgacagggtatctattcccccagggagtcgacttatttctttaacttccaaagctaaatgtacttgctcatatgtaagacgtgcccgagaagatatcactccaggaaaaaatattac

SEQ ID NO: 5092 - DNA, 200 bp, Lawsonia intracellularis
attcttagttttcccatcattatcaaaagaaatttttgtagccattactaaacgttcttcttttggctttaaactacaaaaatcattagataaaaactctggcaacatggattctacagagcatgggaaataatatgaattccctcgtgctaatgcttcactatctaataatgaacctgctctgacaaaatgactcacat

SEQ ID NO: 5093 - DNA, 200 bp, Lawsonia intracellularis
cagcaatggcaacccataaatcccacccaatatctgttggataaacacaaatagcatcatcaaaatctttagcgtcttcaccatcaattgttacaaagtctattactcttaaatcttgccttatagctgtagaacattgtgaaatatcatcatatttctgatagggaacattatagaatactgctttactcttaataaaa

SEQ ID NO: 5094 - DNA, 200 bp, Lawsonia intracellularis
aggtcttttgcaacattttcctcttttaatacatgtaaaggaaattcacatggaatattatagttaagtttcacaactttttcttgtactcgaacatcctcttcaacccccagtgagtattgagcaatacccatcaataactcaccatttgtatttggagttggtataataactaatagctcattttcaatgggtttttc

SEQ ID NO: 5095 - DNA, 200 bp, Lawsonia intracellularis
aggtaactttgatgtgtctacaatgaatagtacattaagcttagagtctacaggatagcaaacaacccctcctttctcatgcttctggctaacacgaacaataacttctttacgaggtctttcaaggatctgtacaacctggccttcaaagtttttaccatgcttagtaggatagacaataacttgaactttatctccat

SEQ ID NO: 5096 - DNA, 200 bp, Lawsonia intracellularis
cccatgcaccattttgaagttctggacggataaaaatatctgaatatggcttttgtgtattctgttgatcaacaataacaaacgctgctccagagcgctgtactacaaacgtccctataactttttgcataggtgatgctattgcccacttctcaccttttgtacaaactatctgaccttgtttctgtaacacgtttaat

SEQ ID NO: 5097 - DNA, 200 bp, Lawsonia intracellularis
actaattctaaagcttgttttttttgcttagtaatttttaaacgtgtaatgatttcattactacttaaaggatgatcagaattatatagtaagcttagtatgtgtaatccatttattttactacctggctgaacactttgacgagtaatatagcttttaggtttatgtttttgtatcttacttgtcttttgtcccaatgt

SEQ ID NO: 5098 - DNA, 200 bp, Lawsonia intracellularis
attatcttttgttttttgagagcgatgttgacttcttttcatctattaccttccaccactctatgtcaggtggctctttcactgttattatcattactatcattacgtagtatatctctttctcttttattagaaaaagtagcttcatccataacatgactaccatgataaaggttttggggagattctggaagtataac

SEQ ID NO: 5099 - DNA, 200 bp, Lawsonia intracellularis
agtagtcctcatgttatctatctcttcatgatcatcagtatgttgtacttctacattgttattgttctgtataacactaacttcatcaacgtcactacgttcatcatcaaaaataattaaatcattagagacagccttatcttgaatagattgctcatactctggagggatactttcctctccctgctcttcaaaaaata

SEQ ID NO: 5100 - DNA, 200 bp, Lawsonia intracellularis
gtgttaccgaactattaaatcctttgtaatcctctatatcttcccctaacgaatctacaatattatgatgcttttcatcccacaatgcagctaaccattgtgggaaactatactttgaccacaaatatccttcaaatactgtttttacttgtaatccccaaagttcactaacaggtaaccactgcagttttacaaagtct

SEQ ID NO: 5101 - DNA, 200 bp, Lawsonia intracellularis
ttcattgtacaaataataggaagattaaaagaaagaagtcgattaatatcttgaaaagtatatctatgatgatcagaaaaaatgatatgagtttctggagaataacctaaatatgactcaactgtatgtaatacctgatttggattccccacacctgtaactaaaatatatgagcggccagcaaactctttagctgttac

SEQ ID NO: 5102 - DNA, 200 bp, Lawsonia intracellularis
tgcctctgacaaacctgctccttttaataaaactggttttaaataaaaactaaagactggtttaccaaaatgaaataatctattttgaataataggcaaaagtgattgcattttttccttatctgccttgataagaaaagcacttgcatcctcaagtgcttggctaccttctctccatgagcctgctggaataactctat

SEQ ID NO: 5103 - DNA, 200 bp, Lawsonia intracellularis
tccattgttttgttaaatcttcctcacttaataatacaaagtctagagttttttttacaccaacctgctgaaatccatcatctaaaagtaataaatctggctttaatacttgtacagcatatcttcctgaacgaattctatttggatctactaaaatagatgcatttggatgctctaaagctaacataagaggttcatca

SEQ ID NO: 5104 - DNA, 200 bp, Lawsonia intracellularis
ccaacttctttgggcttatggtgaggctttacatataaaggtaatatagtagaactattatccgacttatatcctcttgttaaaacagatactgataactgtttttgttctgcccaatcgagtaaccagtcgatcactggagtttttcctgtacctccccaagaaatattacctacagaaatacatggacaatatggatc

SEQ ID NO: 5105 - DNA, 200 bp, Lawsonia intracellularis
tagtcgacccaataaacctatctttccaatagctctacgtattctcataactagagtataaagatacgacaatggtaatagaataaatcctaaatttttttgtaattcaatgaaatccatttatgatttactccattaacatactgctatctaatcattgcttataataaaaaatctgacttattagttatatgttttct

SEQ ID NO: 5106 - DNA, 200 bp, Lawsonia intracellularis
tacaaattcctttataaatataggcaattgcccagtttaaagatatcctgaaaactgggcaataattatgttaattaatagactagttagttaactcgcagtattaactgcttcaaagatagcagtatagttaggctcgtgtgtcatctcaggaacaatttcttgataggtaatcatcccgtttgtatcaacaacaaaga

SEQ ID NO: 5107 - DNA, 200 bp, Lawsonia intracellularis
cagcccgtgctaacaagcgcaactctttaatagctataccatatgcataaccaaaggaaagttctctatggtcagaaagtgtttctactgcactcacaccagtagctccacaccaacgtgcttgtgcaaaaggtaaatcacaactaatagttaagatacgaactttttcaccaagttttgctgcctcactattaaaacgt

SEQ ID NO: 5108 - DNA, 200 bp, Lawsonia intracellularis
tgtgtttctatatcacatactcctgtatctaatgaggggacagcacttaatattaatatattattagcatagtcacttaaagtccgaggagagagatcatttgcaagaactgtaaagtctggtgccttttcccctatagaaacaggattacccataagagttaatggattccctagaaaagttattatatccttacgttc

SEQ ID NO: 5109 - DNA, 200 bp, Lawsonia intracellularis
cttaaccatgtaaattctcctaaagacgaagctatcgtcaatcaataggttatatatatatatattactaattatatcataaaaatagcaaaggtaaacaaattaatctctatatattaccatcacggtatgatatactaattaacatactataaaaatcttgtatacctttcagttatacataccacatcttgagcttg

SEQ ID NO: 5110 - DNA, 200 bp, Lawsonia intracellularis
ataaagaataacatatgtgaaacataaaatcataaaaggactattataacaaataataagtaaaaactagttgctacattaaaacattagaatatttctaaaatgacttcccatcaatattatgataataaaataatacaaaatggatagataatattaaagtattattctaacccattaacctgtataatatactgctt

SEQ ID NO: 5111 - DNA, 200 bp, Lawsonia intracellularis
cttcttgctatatatcaaaatataaaaaatacaaaagatgagcgtgttattagtccaatataggtagttatcttaatatgtattaaagtactctctgtggaacttacttaactcacatataaaaattattttaaccttaatattaattaatcaaaatttgttataacttctacaactaaaaaagattcttaaaatttttt

SEQ ID NO: 5112 - DNA, 200 bp, Lawsonia intracellularis
gtaataaccaaaaactaaggataataacaataatgtcataatatcaatatgatataacttagtattatttactatacaaaaattatactatattagttagtaactacctataagtaaaccgtataactaagtttagttattaaaattaatacatagtcttcatatcagacttaccaagttaagattatttttatattata

SEQ ID NO: 5113 - DNA, 200 bp, Lawsonia intracellularis
ctatatctataatctttagctataacctgttactttatttaaaatcttcatgagcaaaaataataagatatctattcctctcaataatacttattctttagtacgttgggacttactaaagtttgaacaacaactatgtaatagtattaaattaatccttccttttaaaaattatgctatttactttccacagcatcatc

SEQ ID NO: 5114 - DNA, 200 bp, Lawsonia intracellularis
tccccaaaaatcctgaatggcttcccgaagaacaaaaactatttcttccattctggtacaaagacgaattattaggcgttgtcatgattcgtaatcctgatcctaccttaacagagatgttactccctgttctgccagggttaactactttatttttagcacaacttgaacttcataaaaaagcacaacttgattttctt

SEQ ID NO: 5115 - DNA, 200 bp, Lawsonia intracellularis
actggcctaatgacacgccaaaattttatccaattgcttacagaagaaatagagcttatccagtcctcactcaataataacagatatggtggagtagaagaaacaactcattataaaagcagtatagctgttataatcattcgttttaatggactatctaaattaacccacgaaataagctataactttgtagaaaatat

SEQ ID NO: 5116 - DNA, 200 bp, Lawsonia intracellularis
tattgctgatcttgctgatatttttatacaatccatacctaaccatacaattcctgcaagaactggtgagtatgaatttgcattactaataccagaaacaaatagatctcaatgtgatactatcgcaagcaaaatccttttttgtttaaatcaatataaaaaaccttctcccctaactgaccgttatatcagtattagcc

SEQ ID NO: 5117 - DNA, 200 bp, Lawsonia intracellularis
ctcatgcaggctatgctatttatccacaagacatggatagaacaaaaaaagttactatggatacccatgttaacctcatcctacataaagcaggacttgctgctgaaacagcttactccagactttttcatggtgggaaaaatattatgggatatggaagccttctttatgaaggaggagaaatttgtcaaattctacca

SEQ ID NO: 5118 - DNA, 200 bp, Lawsonia intracellularis
ttagcacaagtcgctataaatttaggaagagaaattggagcctatgaaggacaacatttttctgtttggacaacacattatcataatcctaaaaagctaaaagaaaatcatattcccatctataaaggagaaattgtactgcttgaagtaaaagaaaccagtagtatagcagaaatagtttaccttggagatcctacaca

SEQ ID NO: 5119 - DNA, 200 bp, Lawsonia intracellularis
acctttcgaaattggagatatgctcctactccttgatgaagaacatagtttattacaagaaaaatcttatgaaaggcaacaaaaaataaaaacacataaactagatcccacaacaggtctccttcaacattttgactttgtaacaaaattttcagaatcttatagaaaatatactcaattttctttagccattattcata

SEQ ID NO: 5120 - DNA, 200 bp, Lawsonia intracellularis
cagctaataaaactttaaatagtacatctcaagaacaaataaaccactatatcaaagagatagcagtaaaatgtcatttattaaataataacctcaatgatagcgaattatttggtggacgatttgcacttaatagtcttatcttcttccatactaatactcaacctgaatcactttatgcacattacacagcattatct

SEQ ID NO: 5121 - DNA, 200 bp, Lawsonia intracellularis
acaaaaatttctcaagaattaaatataactttaagcgtaggtattgcctattggccttttctaacattacaaccactagacattttagaatgttgtcgcaaagcattggaatatgctcttcttctaccaccccctcatgtagggatatttaactcactagctataaatatcagtgctgacaaaaaacactgtaggggaga

SEQ ID NO: 5122 - DNA, 200 bp, Lawsonia intracellularis
tttattcagtgctattgaagaatataaacttgctctacttgcagataaaaataatgctttagcacggaattcactaggtgtttgtattgcaagccttggacactacaatgaagcccaaaaacattttaaggaagcactccaactcttaccaacagaaccaatgatctcctataatcttggtatgacataccagaacttag

SEQ ID NO: 5123 - DNA, 200 bp, Lawsonia intracellularis
gagatattacatctgcgactcaatacttccataactgtcttacactatgtccaacacatctatatgcagctattagacttggggctcttgcagagtctacaaataatactcaagaagcaataaaatattataaccaggcattatctataaataaaaaacatgcattaccatataggcatcttgcaatgcttgcttttaaa

SEQ ID NO: 5124 - DNA, 200 bp, Lawsonia intracellularis
gaggggaaaaaagaaaaagcaagagaatatcttcatcaggcactattatataatccacatgatacaactacacttatgcttatggcaaaaatgtatttagatagtggtgaagatcccgaaattgctgaaactctttctcgtcaatgtgttgctcaacggccagatattaaatcaaactggattgaatttgctagagctct

SEQ ID NO: 5125 - DNA, 200 bp, Lawsonia intracellularis
tgaggcacaagggaaaaaaaaagaagcaaacaaagcttggctaaaagcaaatgaattataatagttacatatcttctgtaaaccaacactttttttattatttaaaagttttttaatttaccagctcgagttgaattaaaaacagctaataatgctacacctacatcagcaaatacagcttcccataatgtagaaaggcc

SEQ ID NO: 5126 - DNA, 200 bp, Lawsonia intracellularis
tgctataccaaaccccataataacagtttttatccctaacgctagtataatattttgtaaaacaataatgtatgtttttcgtgcaatacgtataagatctactacacgtactggtgaatcatctaaaattactgcatcagctacttcaatagctgattctgctcctaatttacccatagctacaccaacacctgaataag

SEQ ID NO: 5127 - DNA, 200 bp, Lawsonia intracellularis
ctaaaactggagcatcgttaataccatctcctacaaataatgtttgctcaataggcccaaatgactctatcacagcaaccttatcttcaggtaataaccctgccctatactcatctacctgtataatttttgctataccttcagcagagtcagggcgatctcctgttaacataaccactttattaacatatttttttaaa

SEQ ID NO: 5128 - DNA, 200 bp, Lawsonia intracellularis
catcttatagcttctaccgcatccgactttaatgtatcagtaacaacaataacaccaaggtagttagcatccctagcaacatgtatgatactgccaggcctatctacgataataggctcaaaaccatgttcccttaacaaggtttcattgccaacaacaagagatgtctctttatatgttgcaacaatacctttccccgg

SEQ ID NO: 5129 - DNA, 200 bp, Lawsonia intracellularis
gatttcttttaatgctataccacttacctgaggtttttgattaacaatatctaaaataggacgaacaatagggtgagaagagtatgttacagccattgctgccgactgtagtaaatattcacgagagactcctttattaagaagtatccctgtaacttcaaatcttgccttagttaatgttcctgttttatcaaaagcta

SEQ ID NO: 5130 - DNA, 200 bp, Lawsonia intracellularis
caattttaattttttgaagagcatcaaatacacttccacctttaacaagaataccttgacgtgaagcagcacctattccacctaaataccccagtggaatagaaataaggagtgcacaaggacaagaaatgacaattaaaattaatcctctatatatccactcctgtaaagttcctagtccaaacaatggaggtaatatt

SEQ ID NO: 5131 - DNA, 200 bp, Lawsonia intracellularis
gctactaaaatagcagataaaacaactaatggagtataataccttgcaaagcgtgttataaacctctctgtaggtgctttccgtgctactgcattttcaaccaactctaacattctggatatagaagaatccttataagttgctgtagcttttataattaatgaacccatgatattaatagttccaccaaagacttggct

SEQ ID NO: 5132 - DNA, 200 bp, Lawsonia intracellularis
cccaacatgtacaacagtcggtactgactctccagtgagaggagaagtatcaacttgtgaagtacctgattctacaatgccatccaaaggtatcttttctcctggtcttacaagcaaattagctccaggctgcagagattcaggagaaacatcttgtatatgatttttttgcactaaatgtgcaatagaaggttttgttg

SEQ ID NO: 5133 - DNA, 200 bp, Lawsonia intracellularis
ccagtaaagccctaatggactttttagattttattaatgttctttcttgaatgtattcaccaatacgataaaaaaacatcactcccacagcttccgagaaatctccaagagcaatagctataagcgtagctccacccattaaggtaaattcattaaaaaaatctttgcgtaatacacacttcaaaccttgtagtaaaaca

SEQ ID NO: 5134 - DNA, 200 bp, Lawsonia intracellularis
ctccatccacataaaacatatggtataccaaaaaaaattgcatctgtgacaactgaaagggaaaatttatataatttttcttgaaaaagaataccaataataaagaaaaggctagctatccatagtgaaggaggccacgaaacctcttcatctattgcattagtagaataaggttcaaaataaactccaggtaaaatctc

SEQ ID NO: 5135 - DNA, 200 bp, Lawsonia intracellularis
acctgctatcttattaagttctattaagtctggggcactaccttctataacaagatgatgtgttaattcatcaatagaagcaaatgatattcctggtaaagactgtatttgctcttctatgcgaatagcgcaacctctacagtgcaaattatggatagtatatgtcatagttgccacaacatattgcttttattacatta

SEQ ID NO: 5136 - DNA, 200 bp, Lawsonia intracellularis
taattaataattaaatatgaaattagtgttaaaaatctacttaatgttatttcttccagtaaggataactatatctcatgatattttatattaaaaaatatgttatactataaatataagataagttatatctataatgaataatttcaatcagtaagtgccatataaaaaagtagtcctacgaatattaattaatatgt

SEQ ID NO: 5137 - DNA, 200 bp, Lawsonia intracellularis
aataataaaataaaaaatactgttgttataacaaaataatatataactagtagtaattactccttttcaccccaaaataaccaaaggatttcttttgatgtaggctgtccctgatagctaccaataatgaaagctataccagataacagtaaagaaggaacaatagaataaacatttccaaaagaaaaattaaaaatact

SEQ ID NO: 5138 - DNA, 200 bp, Lawsonia intracellularis
tatactccaaaaagtaatcattcctgtaataatagcacaaattgctcctgtagcatttgcttttttccaatatattccaaaaagaattggccaaagaaatacaacttcaaggccgccaaaagcaaaaagattaatccataccaatagcattggaggatctaacgctagaacaaaaacaagtaaacctaataacaatgtac

SEQ ID NO: 5139 - DNA, 200 bp, Lawsonia intracellularis
atccagtacttatttgcttaatatgtttttgagaaacagacgaaatatcacctttccatttatagtgaatgtagacgtctttaacgataactgctgatgctaacaaaagcattgtatctacagttgacataatagctgctaatggacctgctatgaataatcctgcccaaaattctggaagtaattttactataagagat

SEQ ID NO: 5140 - DNA, 200 bp, Lawsonia intracellularis
ggcataacaaaatctcctatagataaatcaggtataataacacgcccgaatactcctgctaagtgtatatttaatagcataaatccaataacaactgtacctatgatcatagctttatgcattgaatatgaattcttataacccatacatttttgagcagtttgtgggagaccaagaacaccaaaaccaataagtatcca

SEQ ID NO: 5141 - DNA, 200 bp, Lawsonia intracellularis
aaaagaaaacataagagtaggagatagaagtccatctggccctgttggagtaataagtccaggatctatattctttagggtaagaatacagttttctatcccaccaccattataaataacaacacataaaataagtatagaagaaatagccataactataccttgtaacgcgtctgtcgttactaccgccctgaacccac

SEQ ID NO: 5142 - DNA, 200 bp, Lawsonia intracellularis
caacaacagtataaaatgtcactgtaagaacaaaaatgacaagaccatactcataagagaaaccagttatggtttgaaaaagcctagctccaccaataaactgtgcaagcattgctgccataaaaaatgtaagtagccctatacaacaaaatacaacaagaatatcactttgatagcgaacacgaagaaaatctactaat

SEQ ID NO: 5143 - DNA, 200 bp, Lawsonia intracellularis
gttactgcatttacctttcgtgccataatagcaaaccgcttcccaaggattccaagagttaaaaaagcaacaggagcttgaatcattgcaagtaaaacccaacttaatccatactcataagcagctccaggaccaccaataaaactacttgcacttgtataacttgctataatagacattgctaaaataaaaccacccat

SEQ ID NO: 5144 - DNA, 200 bp, Lawsonia intracellularis
agagcggcttccaataaagtactctttaataaatgtatctgaatttgttatagtaagatgtttatttgtcagtagtgcaataaaaaaagtaagtcccaaatatatgataatgggaataaaaataatatactgctgcataattataataattctggatgatgttcactctgtatttgggagtttatatcatttgggtcata

SEQ ID NO: 5145 - DNA, 200 bp, Lawsonia intracellularis
attttgaattggtgtatctaatggaacttctttaaaaaagtaatgaataataaaccataatatacaacaaagtaggggaaaccctataagacaactgaaaaaaaaccaacaagggaatcctaatatataactatacgttaggacattcccattacaaataacataggcaaaaagccaccaccatatactataaaaaatat

SEQ ID NO: 5146 - DNA, 200 bp, Lawsonia intracellularis
atatacatgatgttaaccatgcctcataatttgattgtttatattgtttatatgtatgattcttatcatttcttgaaaaaatttctttacttaatctatgctgcataataataataataataataatatatacttttattagctgaactgttaaaagcctatcaacatactttctaataactaaaaaaagttatttagtc

SEQ ID NO: 5147 - DNA, 200 bp, Lawsonia intracellularis
taatacgattttcttactcaacaaaaactctcttttaatgtcatctattcattaaggtttgacataaacaaaaccttctctttgtaactgaacaatttcaacaacaccagcaagagtaactgtgcaaaaaggaaataagtcttttgttgttataccaaattttcattgcattggcacacacgaaaaagtacacatttagc

SEQ ID NO: 5148 - DNA, 200 bp, Lawsonia intracellularis
cacaaaaggttaaaacttttcaaagtatatatattagttaaaagttgaccaacaccaatgcttgctaataaaataactgaatatttttcatctggtagtgctaatagtagtttattatattactaagaacttatatccaattctgagcgtcatctaagtctatatgaagtaataagtcataatacatataaattctttta

SEQ ID NO: 5149 - DNA, 200 bp, Lawsonia intracellularis
taaaatattatagttagattattagaataatatattaatattatactaacatcattagctatctattataattagattatttatatagttatatacaacatataataaataatacatattaaaagaagtattactttatatataaaacatatttttatctaaccttattatttttctatctataactaattatgttacaa

SEQ ID NO: 5150 - DNA, 200 bp, Lawsonia intracellularis
cgccatattcttgtttcaccactctataaaaatactaaattatcttttattacatctgtaactcatggattaattattggagtctgtgttggaagtatcatttctttatataggttaacacacacagtatgtctcaattttatactacagatattacaccaatggttgaactatgtatgggtaatcccattatggttttg

SEQ ID NO: 5151 - DNA, 200 bp, Lawsonia intracellularis
tatactttttatcatttcctggatcattggtaaacttgtagcttacgcaccacatattgccggtagtggtgtcccagaagtagagcttacacttacaggagatctccaattaccatggggaaaaattcttatttctaaatttataggaggctggctagctattttaggaggtctttctcttggacaagtaggtcctagta

SEQ ID NO: 5152 - DNA, 200 bp, Lawsonia intracellularis
tccaaatgggaggactaataggagatggatttagtcgctattggctaaaacaacaatctaacttccatattattggagggattgctgcaggagtctgtgctgcatgcgatgccccaattgcaggcttattactagtttttgaacaaataaaatatcctataactatacgctctttaatcattactattttttctgtgatt

SEQ ID NO: 5153 - DNA, 200 bp, Lawsonia intracellularis
ggtgcacaacttgtattaacctatggatttggtattaaaagaatgtttaactttgagtcatttcttagtcctatattaaatgaaacgccactacttatagctactggcattataatagggataggaggagcattatataacactatacttttatggttcagagagagggaaagtaaacaaaaagttgttcctaatctttt

SEQ ID NO: 5154 - DNA, 200 bp, Lawsonia intracellularis
cagagcagctccccctctcttttgtgctggtgtattaattttttttctacctgaaattacagagggcggggaaaacctcatacgtcaacttcctagcttttcatactcattatattttttagcgattcttcttctatttaaagttattttctctgcatacagcactacaggaaacatccctggaggtatccttatgccta

SEQ ID NO: 5155 - DNA, 200 bp, Lawsonia intracellularis
ttctttcaataggtgctacctctggcctcatacttggtaacatgtttgctcaacaagaagttattggatatatgcaagcaaaaagttatcttatttatggtatggccgggttttttgcagcaactgttagagcacctctaacaagtataatattagtaacagagataacaggagcattacagtgtattccaggaacattt

SEQ ID NO: 5156 - DNA, 200 bp, Lawsonia intracellularis
cttgtaggctttctaagtcattttacagctaacttagtacaatctacacctatctatacatctttaaaaaaacttgcttatctcagactttataataaccgtaatttatagtaattatcctgcttttatactaagctacaaaacataactcactctactcccttacttatcttagcataactataatttataagcccttt

SEQ ID NO: 5157 - DNA, 200 bp, Lawsonia intracellularis
aattattatcatgaaagaaacattacataattatacatttacgacaggagaaaaaattacagtcatagttaaaaaaggttcacctagacgtaaacatattgctatttgtataacaagtagaggacaagttgttattacaataccatatggagtaatgcaaaaagatgcattacaaataataaacaaaaaagaaaattgga

SEQ ID NO: 5158 - DNA, 200 bp, Lawsonia intracellularis
ttaaacatcacctcattaaaactcttaacaaacctcaaccctctccattaacttatactacaggagaatcacatttatacttaggaaaaagatattctcttattgttcttaaagaaaaaaaatctcgactatccctgcaacaacgtatcatacttaacaaaaatgaaatccaggtaactccattttccaacaactcatta

SEQ ID NO: 5159 - DNA, 200 bp, Lawsonia intracellularis
acagtcaaaaggcttctttttaaatggtactatgctgaagctcaacaatatattgcaaagcaattatatctacttttacaacaaatcccttggttacagacagttcctacatggaaaattaaagcaatgcggtgttgttggggaagttgttccccacatggcgtaattacaattaatacacacctcattaaagctccaac

SEQ ID NO: 5160 - DNA, 200 bp, Lawsonia intracellularis
aatatgcattaattatgtgttacttcatgaaatagctcaccttaaggagcacaaccatagccataactattataaattattaacaaaactgatgccaaactggataaacataaaaactcaactagaaaatatagcaccatttgttttaatgagttagtaatattttttacaatataattaaaaagttaaataatataata

SEQ ID NO: 5161 - DNA, 200 bp, Lawsonia intracellularis
ccatatcaaaatatttttatttactctaattaatatatctagaagtgataaataaatatctttgaaatatagaattgactatattgtataataaatatagaatatacgttatttaataataaatattttaatattacagtacctttttaatgagaataaaaaatatacaaaatagaatataaaaaactcaattaatcaaa

SEQ ID NO: 5162 - DNA, 200 bp, Lawsonia intracellularis
ctagacaacaaactactagctctctttaactgtatatttttattttaggattattacattgcgttttttagataaattttatgacatgaatagaactttacaggtaacacatggtaaaagaacagtccccttctacagttaggacaagatgtattaagcgtatagtagaccaatgttccctatggcatcactgcattcct

SEQ ID NO: 5163 - DNA, 200 bp, Lawsonia intracellularis
atagcatttgcttttagtcttagtagtataggaaaaagttttctctttaccttaccattttggtctaaccactggaaacctaattcagaatcattttttattaataaaccttatgggctttggattacctcgataactattcttctacttggaatacttcttcactatactaataaattaaacaacgaaaattcgttaat

SEQ ID NO: 5164 - DNA, 200 bp, Lawsonia intracellularis
tcacaattttataaagtcattctcccatatcataaaacaagtagtacctataaaatctcataggattatattatggaaaaagagtcccttacaacctctctttgttacttatcttattgtaatactcttaaatatattatttgaacagtttcaaccctacttctcagacttattcaaagaaactatgtactctattgaac

SEQ ID NO: 5165 - DNA, 200 bp, Lawsonia intracellularis
taggagtcatagtttttacaggattactatgtatttctattttcccacctgtttatgcatgtattacttatgccttagcgatagtatgtaatattgctttttatgaatgcacgctgtatattgatcccagctatatacatatgtttcaagtaatagcaccatttttagcacttccactttttattattggtattccccat

SEQ ID NO: 5166 - DNA, 200 bp, Lawsonia intracellularis
ttagaaccacactataacataacaaatcctaagaaagtatctagacctactgtcaacatttcaaatcacagtttacagtatgtagccctctcccttataggtttattatctacattccaattctttcttaatgctgcaacaatagatacatttatttttattaatgcttatctttcagaaaaatactctgcaacaatttt

SEQ ID NO: 5167 - DNA, 200 bp, Lawsonia intracellularis
tatgctcagcagtcagttaattgcagcaatttttgccatatggataattaaatctaaagataatgcacatcttatgttactgctttttatcctgggtctcttaggaatcagtactattctttatagtattcttatccaaaaaactgttccaatagctattctccaactagcttcaggcttaataacaatgttttgtataa

SEQ ID NO: 5168 - DNA, 200 bp, Lawsonia intracellularis
taacattttctatattagtgcatagtcaaaaatgtatgtataaaatacttgcactatcaatttttgttatgaatatagttggatatttttctggatatgcattatggaatatagcaatattcttaaaaaattcctctagctctattatacatatacacattcctatattaggaattgtttcagttttatcaattctatta

SEQ ID NO: 5169 - DNA, 200 bp, Lawsonia intracellularis
attcaatctttatattaccatattatggatatatcctatctatgttatatattaagttctcatgataacagtatggatgtgtatgtttaccaagacaaactaaatacccttacacctagagaaaaagaaatattgagtcttgtacaacaagggttgaagaatattgagataagtaataggttaagcattacagaggggac

SEQ ID NO: 5170 - DNA, 200 bp, Lawsonia intracellularis
gttacgtgttcatctacgtaatacttatcgtaagttaaatattcaaggacgacaaagcttaaaaagccttcctcataatttataagtatatagaaagtttattttacattcactccaaaacctataacagtaaaggatttgaatgttacataattctaaaataatctttcctaccttatctattcggatatattacttta

SEQ ID NO: 5171 - DNA, 200 bp, Lawsonia intracellularis
tcttctgtatattatctatagtggtgggctgtactgtttttctactagtaaagcaaaatgcttcagacttattcttatataatttgttaactatcaatacgactatacttaaaaataaaacttatcctcaacatatctttcaattaaataaaaatagtaaccaactattttctgaaaaaaatctttttaggaataatcaa

SEQ ID NO: 5172 - DNA, 200 bp, Lawsonia intracellularis
aacgtacctaacctactatatagtaatactattcacaagtttactgaaaaaaatgatactaaagatacatttaatttattgctattatgttctatctttttttttgctataccatacatcattttttatttatttgtaatatatccatttatcaacttatgtcatacaatagaatatttatatagcaaaaatagtaataa

SEQ ID NO: 5173 - DNA, 200 bp, Lawsonia intracellularis
aaaaatatttaaaactactatattcgaattcaaaaaaattatttctatagtccaaaaaaatattattaaacaacaagaattatatcataaactacaaattactaaaacagaaaaaaagtatattcaacgtattaatagtatagattacacaacagggctattagataaaaagtgtattaatacgtatttatcaaaatatc

SEQ ID NO: 5174 - DNA, 200 bp, Lawsonia intracellularis
ttggttatagtgtattaactatcttaatgatagatattgatcattttaaagcttataatgatacttttgggcatgttgctggagataaatgtcttgctgctgtagcaagatgtataaaaaatgcacttaaaagaaaagaagatattgtatttagatatggtggagaagaatttattgccttactcccaaacacggcaata

SEQ ID NO: 5175 - DNA, 200 bp, Lawsonia intracellularis
tcaggtgcacatattgttgctcaacgtatccataactctcttacgcaaatgaaaattccaaacactacttcaacagtatacccgtttcttacagtaagtataggtattaatgaagtcttaccatacaaacatactacaccaatagacgctgtccatcatgcagatatagcactttatacagctaaacataatggtcgaag

SEQ ID NO: 5176 - DNA, 200 bp, Lawsonia intracellularis
tcaaacagctgtccattctaattaactgggattaatatatgaagaaattcttgaagttataacatactaaagagcgacatcaaaccatacccttgctaaccaacctatcacaaatgatactcctgcaaccccaaaacttattataatcatctcttggaatgaaggtaaaaatggttttctatgaataactgagactacat

SEQ ID NO: 5177 - DNA, 200 bp, Lawsonia intracellularis
atgtaaaacataaaataataagaccagcagtaataaggcaaaagataagtgctataataggtgaagaacatattataaatggaactaaaagtagagttactgttatgaggtatgttacaccagtatatatagctgcttttagtggatgtttatttgttttctcagatcttcgagcaagatattctgatgcagccattgaa

SEQ ID NO: 5178 - DNA, 200 bp, Lawsonia intracellularis
agtgttgctgaaacccctgtaataaacccagccatactgattactttattatcgtggagtgcaaatgtaaatccagctaaagctcctgtaagctcaactaaagcatcattaagtccaagaaccattgaacttatataggttaaaccttcagactcaataagaacagcaaattgtgattcatgcttctcttcatctgccat

SEQ ID NO: 5179 - DNA, 200 bp, Lawsonia intracellularis
tatatctttagcctcaggaatttcgtcactaatactttgatatgcctcaattgcagcaatctctctagattctaataaattgataacaaagactaatccaaaaatttttcctaatagtgtgaaaatccatactcttattgaacttattgatgggctaccccctatatacttattccaaattttactatggttatcctcat

SEQ ID NO: 5180 - DNA, 200 bp, Lawsonia intracellularis
cttgggccatttgctctaaaatttttttattatgaagtgaatttgtttgcttagataacaatctatatatttgactatccgtggcttcattatcacgcatacgacaaagcatagcttgtgtttctggacgcatttactcttccttatcttctttataaaacaagaagactactatagtagtcttcttgttttataagaaa

SEQ ID NO: 5181 - DNA, 200 bp, Lawsonia intracellularis
cttgttataaatactatttgctttgttattataaacttgaacaacagataaatatattatacataataacgttcaagaaaatctttatgttgggcaaaagaccaatgctcattttttaaaatattaatagcatcatctctatttttattttttattgcagcaataaatctttcatgctcacttaaacgttgattttccca

SEQ ID NO: 5182 - DNA, 200 bp, Lawsonia intracellularis
atcgtcaaaacaagcagattgacaaaataaatgtagccgatttgccacagaagtatgtaacctacgtaataatgcattttcagttaaatctaaaaaaatatcatgaaatctcatattttcttcatgataagctgttgcttgattttgctgtaaaaaaagtttttgctttgaattagattcttcaagttccttaacatggt

SEQ ID NO: 5183 - DNA, 200 bp, Lawsonia intracellularis
ccatagttaaaaaatcaaagacttcattaaggcattcaatttcaagagtattgataacttgataggcattacgcaaaaaagcttcatttacaggtgttaaatatacacctttccgagcaacaatcgttaccacaccttcagattcaagacgaattaaagcatcacgtagtggtgcacggcttacttgcaactctttacaa

SEQ ID NO: 5184 - DNA, 200 bp, Lawsonia intracellularis
ataagatcttgattaatagcttgtccatgctggacacctcccgttgacataacccgtgttaaatattgataaacacgttcacgtaagggatctttttgttgactttttataaaagcactagcctcaatattatcatttctttctgctaacaccgtcatggcaacctcattaataatctagagcaaacttgctccatacag

SEQ ID NO: 5185 - DNA, 200 bp, Lawsonia intracellularis
ttaagttagtcatattctaaaggaatactcctttatcaaatgacaaaaatttcagagaaaataaaaaataaagttaatgttaatctattaatgtaaaataactatatagatttgtaccttcttcattttattcataatttactctgaaacagctcctgtaatatattaaagaagtttgaatattttatactttattaata

SEQ ID NO: 5186 - DNA, 200 bp, Lawsonia intracellularis
tcaaacttcattgttttgccaaaggttagttagttatcaaatgaaaacatcttattgattagaaatagagttaaatatctaaaaatttactatatattatttagctactactattatatgttaaaaaatagattttgatatataagaacagttagtaaaaattataatcttaacaaaaataaaattttttaatttaattt

SEQ ID NO: 5187 - DNA, 200 bp, Lawsonia intracellularis
ttaatagttaactgctttacaaaaaaaaattagcctaaaaaactatcacagtcaacccctagtatttaattcttaaactacttattaatacaaaatattttctacaactataatatatggtaatatatagtttttcataatacaaaaaatatattattcctgtgttgttatttctacacgttcttcatgaattttcatga

SEQ ID NO: 5188 - DNA, 200 bp, Lawsonia intracellularis
gacttttaagttgattttcttgttctgatgtttttgcaagactacgagctttctctgaccataatgtaaatttttttatatcattttgatataatgcactataagcaagatgaatatatgcttcaaatacatttccagactgaccaagtgaacgaccataaatataatgaacttctgcgtcttcgggtaatattttcaac

SEQ ID NO: 5189 - DNA, 200 bp, Lawsonia intracellularis
aactgcttataatatgtctgtgcttctgtactattaccagcatcatctagagctctggcataaaaaaactgtgcaagcacatccttagaatctaaagataaagctttcttcaaaaactggatagactgtgtaccatcacccctattataataaaacattcctgtttcccttagtataagggcatcattaggagcacatac

SEQ ID NO: 5190 - DNA, 200 bp, Lawsonia intracellularis
aactgccttatgaaaagcatcttctgcaacctttattttattttttctttctgcaagaattcctaaacccattaaagcaagacagtctttttctccagactttgtaaaaagccaatatgctgtttctggctcaccataacgagcccatataagagtcctaactcttttaaatcgtttattattttctactctagcctgta

SEQ ID NO: 5191 - DNA, 200 bp, Lawsonia intracellularis
tgctttgtggcaaagaagcaacacgagaatgaatttcattaatacgttccccaatatccgggtgtgttgataaatattctggagtactagcacctgatgcccactgtttacgacgaattttttcaaaagcttcttccataccttgtggtttaaaacctgctttaactaaatactgtaatcctatttgatcagcttctgtt

SEQ ID NO: 5192 - DNA, 200 bp, Lawsonia intracellularis
tcatcagaacgactatagttcaacattgctgtttgacctgcagctaaacttccagcaaaaacagcgccagtggtatttcctccccctaagaaaacacttgcaagagcacctaatatacttgcaacatttacaatttgagcacgctccatacgacgagctatgtgtcgttgtgtcacatgagcaagttcatgagcaagagc

SEQ ID NO: 5193 - DNA, 200 bp, Lawsonia intracellularis
accaaccaattcagactcattctccatattcatgataaggcctgtattaacaaatacatagccaccaggaatcgcaaacgcatttactgagttatttaaaacgacacttgctttaaattgaaaaggttgtggaggcatagatgctgctaattgatctacaattgactggatataaccaacaatttcaggatcctctacaa

SEQ ID NO: 5194 - DNA, 200 bp, Lawsonia intracellularis
cagccatctgagaacgaacaagaagattaaattttttccctagctcaagctcttccttaagccccatactactaaataaaccagatgcataaataggagttaatatgagagaagtagaaaaaagtactatagtacaacaagaaaaaataacaactttaatataagaaaaaggtagtagttttttataaaaaatattatgt

SEQ ID NO: 5195 - DNA, 200 bp, Lawsonia intracellularis
aataaagtaagaacagtccttaaccaatctatcaaaatgtggcatttcataatttctcatatgtgttaaaataaaaaataagctgaagcagttgctaacttacattgtaattattattctttttgttctaatatataatatattacaaaaagaacaaagagcataatataagtattatttattataaaatatcccacacc

SEQ ID NO: 5196 - DNA, 200 bp, Lawsonia intracellularis
tgaccttctgaagtgtcacgtatttctatacctaatgaagctaaggtattacgaacttcatctgcctgaacaaaatttttttcctctcttgcttgccttctcttactaagtaactcttctacttgattaacatcaattttatttctaataatgcgaattgttttgagatcttgtaaaaaactattaggtttttgaccaaa

SEQ ID NO: 5197 - DNA, 200 bp, Lawsonia intracellularis
tacacctaataaaatatctacttttcgtataatctcacgaaattgttcaaaaaccaccttcccatcagttgtggagtaaagagctttatcatcaagagcacgtctaactatatggataatattaaataaatgacctaatccagcagctgtattgcaatcatcttctagcgcagacataaatagtgaaaattgttcatcta

SEQ ID NO: 5198 - DNA, 200 bp, Lawsonia intracellularis
actcagctaaaatagagctagatgaaccacctgagtcccaagattttctttcaagtgctttatctacctcagcaatacattcatacactcttttttgacttcgttctgtctcattcattccttcaaaagaaaaatctatagggcttctataatgcttttttaaaaggaaaaaacgtaatgtttctgggagatatgcttct

SEQ ID NO: 5199 - DNA, 200 bp, Lawsonia intracellularis
aatatatctctaacaatcttaaaatttccaagagattttgacattttttctgaatttacttgaacaagcccattatgcatccaaattttagccaacggcttatttacaattgattcagtctgagcaatctcattttcatggtgtggaaaaataagatcaattcctcccccatgtatatcaagaggaagtggccaacactt

SEQ ID NO: 5200 - DNA, 200 bp, Lawsonia intracellularis
ttcactcattgctgaacattcaatatgccacccaggacgccctcttccccaaggactttcccaagaaggctctccaggcttagctgctttccaaagaacaaaatctaaaggatcttctttctcctcactaggtacaatacgtactcctatacgtaactcatcaggagttctaccagaaagttttccataatcagggaaag

SEQ ID NO: 5201 - DNA, 200 bp, Lawsonia intracellularis
aacgaactctaaaataaacgtcacctgaagctgtaatatatgctttatcagcctctagtaatttttgacaacactctatcatttcagggatataatctgtagccttaggctcaatatctgcatttagcacaccaaggcgatccatatcttcatgaaaagcatttataaattcttctgcaacctctttactactacggccc

SEQ ID NO: 5202 - DNA, 200 bp, Lawsonia intracellularis
tctttattagcacgattaataattttatcatcaatatctgtaaaattacgtataaatgttacatcatatccttgatatcgtaataatctcaccaagatatcaaaaactatggcagatcgtgcatgtccaatatgagaaaaatcatacgctgtaattccacaaacatatatacctaactttcctgaaattataggtataag

SEQ ID NO: 5203 - DNA, 200 bp, Lawsonia intracellularis
tggctcttttttcttttccatagtattatatagatgcataaaacctctccacatcacccataactaatgttttaactttatactatagaaacaaaaaagatatgattctaaaaacataacttaataattataactttggttaatcaaatgaagcaatacgctgaagatgtcgtccaccctcaaatggtgttgtcaaaaaa

SEQ ID NO: 5204 - DNA, 200 bp, Lawsonia intracellularis
atattaacaatctctattgcaatgcttttacctattacacgttcacctaaacataatatattagcattattatgtagacgtgttgctcttgcttggaactcagaagtacatagtgctgctctaataccttttatacggttagcagccatactcatacctatacctgttccacaaattaaaataccaaaactgcctatttc

SEQ ID NO: 5205 - DNA, 200 bp, Lawsonia intracellularis
atctaatacttgttcacaaacatattgagcatataaagggtaatcacaaggttcagatgtcattggacctaaatctcttactatataatcgttatcttgcaattgctctataagagtattttttaaagaaaatcctgcatgatcagaagcaatgtaaacttttagcaccctaaacctcaactacttacaaggcaataagc

SEQ ID NO: 5206 - DNA, 200 bp, Lawsonia intracellularis
ttttagcaatcgtctttgcaacacatctgtacaatttttactaaaagcactttttttcttactttctaactgaatgatatctttactcacaagatcaagctcagcttttaatttttcctgttcaactggagttaatgtatttacaaaataactcaattgtatttcaagtttatttttatgtttttttaatctagcaatac

SEQ ID NO: 5207 - DNA, 200 bp, Lawsonia intracellularis
ataatgaaaagaaaatatctaacccaacaaaccaacggacatatattactaacacccataaaccagtatacataacacaaaataaatcttggactttaccccattctatctgaaattccattatgttctctcccccctcccttaaaacttaaaaaatttaacactaagtaaaagttattttatcattttaccctacttca

SEQ ID NO: 5208 - DNA, 200 bp, Lawsonia intracellularis
ttcataagatatatactgtacatcaactccttcaggaagaataagttgtaactgagagttagtaaaattttgaagaaacgtttctctacctttaacaataaaaacaattttattgtttttgttatcaaacaaaattaccttacttggtagttttgtttgatcatcataagtaatagttaatgaccatccaacagtagaat

SEQ ID NO: 5209 - DNA, 200 bp, Lawsonia intracellularis
tttcccatttcactggcaaaccactttgagataattctaaagttccagataactttcctcctagcaaagtatatataatgttcccattagacatagataaaggagatactccctgaacctgttttccaaatacattataaaactgaccacgtataagtgatacaaagtcataaaatccaaatggtaaaggtttttctaac

SEQ ID NO: 5210 - DNA, 200 bp, Lawsonia intracellularis
tctaaaaataccttatctgtattagaaaaaactttagcttctttatctataatagaatatataataaatttatcctgtgttgcgtgtagcctaacaacaggagtattcatcccagccatcccatctaaacaaataggaaaatttccattactccatataataacagaaagcctttttattgctttatcagcatgatataa

SEQ ID NO: 5211 - DNA, 200 bp, Lawsonia intracellularis
taatgttccttttattctatatggagtactttttttcccctgctgttctgcatacctttcatatgtgtaccatatctcatgcacgtccttagaggcaataggaaattttgtttgtactgaactacaacttattattaatagccctaattccaataagataacataccgtaataagatgatcattatgatcttacagtcct

SEQ ID NO: 5212 - DNA, 200 bp, Lawsonia intracellularis
tgcaacttcttttgtattgcttctacatcttgtggctgaagttttatagctttttcccaacctattttagcatccttcttttttcctatagcttgagcaatgtctccataatgttcccaaatagtgggatcattactatcttcaagactcacagctctattaatttctacccaagctttttttatctctccttttgcaaa

SEQ ID NO: 5213 - DNA, 200 bp, Lawsonia intracellularis
aaatgcccaagcaagagaatctacaatataagcacggtttggtataagactatcagctcttttaatcaatgaaagtgcacgatctatatcacgtttatcttcaattaaacaatatcctacaaagtttaaaacttcaggataatcaggataacgagaaataagttgttccataagctctaatgattcagacttttttccta

SEQ ID NO: 5214 - DNA, 200 bp, Lawsonia intracellularis
atccatttatagctacacctttcaaaaaaagaagtgttttctcctcaggaaacaattctaatcctttactaataacaataagggctttattatactcttttttattaagcaacaactgaacttctgttgtccatagctcttgttctaatggagctgcttcttgcccttgatgtagtaactgcattgcttgatttatttta

SEQ ID NO: 5215 - DNA, 200 bp, Lawsonia intracellularis
ttcaaactgtaaaaaatttgtacacgcaataataatgtattaatataatacttatccttactactagcctcttcaagcaatgttaatgctttgtcataatttttataacattcatactcaatagctccaaggatataaagtataacatttatgtcacctgctgcttctgggcgctcttttatttgtttaagtaatagctc

SEQ ID NO: 5216 - DNA, 200 bp, Lawsonia intracellularis
tgcttgagtataaaatttattttcaagaaataatgtaacagcagtcaaacaaaagctgtaattctctgaactttctgttatatattttaaagcctgatcaggcttctttagtgataacattgtactaataagatgtagccgtacactctggttaccagagtctttatctagcaagtcaagatatactttaattgcttcag

SEQ ID NO: 5217 - DNA, 200 bp, Lawsonia intracellularis
aataattgcctgttttttctaatagcttacctgtttcaaaccatgcttcaagaaattcagggttttcttgcacagctaacttcagctgactcatagcttcagatgaacgacctaatgctgctaaggactgagcatagcaatatcgaataaacgcattgtaataattctttggcaaagaagaaaaaatatctactgcctct

SEQ ID NO: 5218 - DNA, 200 bp, Lawsonia intracellularis
ttataattttctgtcttaagataaagtattgctagttcctgtctcactaaatctgactttggatgacgtaattgatatgcttgaagagactccaaagcttttactggataaccttcttcaagccagcaatcagcaagtagtagataaaatccaaactcatcaggaaataactgtatcccctgttctaaaatatttcttgc

SEQ ID NO: 5219 - DNA, 200 bp, Lawsonia intracellularis
tgtaataggatctttctctaaaagaaaccatgcggcactatctgtaaagaattgtggcgctgggctatgtttcaccaaaatactcattgcctcaagaacaccgctcttatctccaatcctaatcgattgttcaagcaatagaatgccatatgttacttgggcttctggagtaagattccaatgaatagtgttatgttgtg

SEQ ID NO: 5220 - DNA, 200 bp, Lawsonia intracellularis
aatttttagcaacacaagcttgtagtgggaataggattaaacctatactcaagagcaattgtaccagtggccattgccttaatacattatgaacaaattgtatcacgttcatatattacctaagttaaaaattaatggcctatccactcttctgaaaaatcacctatttgacgagataaatgtgtacgtagcttttgtaa

SEQ ID NO: 5221 - DNA, 200 bp, Lawsonia intracellularis
taaacgtgcttctagttgtctcactctttcacgggttacactgtatttttcaccaatttctcgaagtgttacaggatcatctgtaagtaatctattatgaagaatatacacttctttttctgaaagtaagggtaatatatcttttatcctatcttgaagaagtatagctatttcttgaccagcaagactctcttcgatcc

SEQ ID NO: 5222 - DNA, 200 bp, Lawsonia intracellularis
cagggttaattgctggtaaaaaatctatacgtgatgcatttcctgtctcttcaccaacagttacatccaatgacatatctgatgcatctagtcgttgttgcatctcaataatttgttcttcaccaacacctaagcgtaatgcaagtgaggatgtatctggatcaaaaccttcagcaaggagtttttgtctctcacgatta

SEQ ID NO: 5223 - DNA, 200 bp, Lawsonia intracellularis
agattataaaacaattttcgttgtgcctgtgttgttccaatctttaccattctccaattatccataataaacttaagaatatatgcacgaatccaaaatgctgcataataagaaaacttaatacccttatcaggatcaaacttattcacagctcgcataaggccaacattaccttcttgaataagatccaatacattttg

SEQ ID NO: 5224 - DNA, 200 bp, Lawsonia intracellularis
catccaacgacgttgaaagtccattgctatcttaaccacaagacgtaaatgtgaagaaatcaaacggaatgcagccttactacaaccttttttctgtacatcctgcgctaacctaagttcttcttcaggttttaacataggaaagcgactgacctctcttaagtaaagctgtaaagaatctcttgtagccgttgttgtag

SEQ ID NO: 5225 - DNA, 200 bp, Lawsonia intracellularis
acagtgtcacttgagaagacactacagtttcaaaacccatttcatcaagctcactatcttctataagatcacaaagaagatcttcactactacttaataaagtatcatccatttcagtatctgggtcttcaatttcactttcttctttactatttctttttatcttttcatattcaactttgcttgagctagctttatat

SEQ ID NO: 5226 - DNA, 200 bp, Lawsonia intracellularis
gtgtcatcatttttcctttttttactgcaaaaagattgctctgaaatacttttgtcaagtaaaaaaggagattgtatatcgtaattcatagttcactctcattgttaattttgatgagaacggatttaaatatagctatattcctagtaggatatactataaattcaatttattattttcaataattttcccttttaata

SEQ ID NO: 5227 - DNA, 200 bp, Lawsonia intracellularis
actttaaaacataaaattttaggctatactaaaaaaaataaataaattttttctagagagttaaagtataacctattacttctctaaacaaaaccattacctcttttgatataatattcaatagttactaaaaaatcatcatataaataaaactatgaagttatattctctcattttaataaaatataatatgttatatt

SEQ ID NO: 5228 - DNA, 200 bp, Lawsonia intracellularis
aagttattattctacttttttcagctcatttaaaaaaaggaagtgatattttatagttataagatacttaactaacaataaatcccatttaatccaaaaaaagatattttcaatttttatgatgcatttctgatgtaaacaattaaaattatctatagtttgatgaattaaaatagatattttaattttatataatttag

SEQ ID NO: 5229 - DNA, 200 bp, Lawsonia intracellularis
tagctatacacatgttatgtgataaaaatatttttagctattttaactatcgttttttaaaaaatataaaattatataaaggatataaaaatataaaaattatataaaatataacatatgaatataaaataataaattttattaaataaaaaaataaaataataaaaaatttactttaataataaaaaatttatctttat

SEQ ID NO: 5230 - DNA, 200 bp, Lawsonia intracellularis
aaaatataaataaaacaaaattgttagaaattaaactataaatttataatttatctattataattatatataattatattatataataaatgttacttctaaaatacagcaatatagttttcccttgatattttaattcatattatttattatataagtatattttatatattataattgaataaaagcgagttatgctg

SEQ ID NO: 5231 - DNA, 200 bp, Lawsonia intracellularis
attaagaaactggtttttattatatatttatattatcataatatagtatatagttactatcatgtagatatataataaaaaattgtgataatattaaataatagtaatattaactttgatagttttgctattctttaacatctgtattactactttaaatttaacttgattaaataaaaataacaaagtaataggagatt

SEQ ID NO: 5232 - DNA, 200 bp, Lawsonia intracellularis
tcatgtatactattcgtactatttttctatatacattatttattgctttaacccatatttcgttagcacatgctgaagaaataaagactatccaagggaaagaactagcttatttcatttcacaaaataaaggaaaacctattttcataacagtttttgcaacatggtgtcctgcctgtagacaagaaatgcctgggatt

SEQ ID NO: 5233 - DNA, 200 bp, Lawsonia intracellularis
attgctacacaacaaaaatattctaaagaacaagtaacatttattggtatttcacttgatgataatgtagaaaacttacaaaattatataaaacaatcaaaaattacctttcctgtatatattgctggctcaacaattccttcaatgttctccatcacagcaataccacacaatattatttatgataagaaagggactct

SEQ ID NO: 5234 - DNA, 200 bp, Lawsonia intracellularis
tgtaatgaataaggctggggctctttcagcgaatgaattaaatactatgctaaataagtatatcaaataaaacatcatgataggctagtagtcaaataagaaaaagaataactataaataattatattatataaaatttaatactatatttttatagtatatatatatataattaattaaattttgttttctatatctat

SEQ ID NO: 5235 - DNA, 200 bp, Lawsonia intracellularis
tggtgggagtgaaagaaataataggaataaagtatactatatatcatatatatatattaaccttactagttttgtcttatttttttaagattttcttagttttaattaaaataaatatcatatataaaaagtcaagtagtaataataattttttctttgtaagtaagtatgaaaaatactattaactctacctagataat

SEQ ID NO: 5236 - DNA, 200 bp, Lawsonia intracellularis
atatatatatattgaaaaatattactttaactatacatatcaaaatatattctcataactctaaggacttattataaggtaatacggttatggttgaacatattatggatatgtactatataactcttcatattaaagaaaatatctctttatatcttgtagtaaggtttaaacgagttatatctttgaacaaagtttta

SEQ ID NO: 5237 - DNA, 200 bp, Lawsonia intracellularis
tctatagttactacttgatattaagatgattctttctaattacttcttaattaattaggaacagaaagtggatagcaaccttcaccaaatttttacgatcagtatacaaacagtaatccttaacaacctattatggttatgtggattggagtctttttcatgattgttacctgtccaaactgcctaacaaaattcaattt

SEQ ID NO: 5238 - DNA, 200 bp, Lawsonia intracellularis
tcctgatagtcaaggacgccctaacacaaaattgcgctgttctgtttgtaaacatatttttcctcttatacaagaagagcaaaaacttagcttcaatactgttaactcttccaaatcttcaagtggaggggaaaagaaaaaaaaatggagctccacaaaaaaattacttctgcttttcatactcctaactctaactgcag

SEQ ID NO: 5239 - DNA, 200 bp, Lawsonia intracellularis
gtatttatgcctggtacacatacccccaactaaaagatgttgttcaacattttctcttttcagaaaaaaaagaagaacctactgacttaataagccttattgctcttcgtgatgttgtccaatacaatattaataatgaaaaattaggaaatatttctgttatagaaggaaaagttgttaatggattttctgatcctaga

SEQ ID NO: 5240 - DNA, 200 bp, Lawsonia intracellularis
gaattaattagactagaagcttctctttatgacaaaaatggaaaactccttgtatcaaaagaacaacttgcagggactagtgtatcactttttcaattacaagtccttggcgaacaagaacttgaacgtgcccttacaaataaaattgatatccttgctaacaatacgaatatccctccaaaaggtgaagttccttttat

SEQ ID NO: 5241 - DNA, 200 bp, Lawsonia intracellularis
gatagttttttataatcccccagacaatgctgctgaatttggtgttaaagttattgacgcacgcttacctcctaaataaaaattgactaatctctattactattcatggctaaacctcgagaagtctatatctgcattgaatgtggagcacaattcccccaatggcatgggcaatgtcttacttgtaaaacttggaatac

SEQ ID NO: 5242 - DNA, 200 bp, Lawsonia intracellularis
actaaaaatacacaatgcaccttctacaaccgctcaaaaaatatataaaaaactaaaacctataccaattggtcgtgttgaaacctctacctatcaaccattcagtactgggattaaagtattagatcatattcttgggaaaggacttgtgcctagtagcgctctacttattggtggagaacctgggataggcaaatcta

SEQ ID NO: 5243 - DNA, 200 bp, Lawsonia intracellularis
cactattacttcaacttgctggagctacagcaacattagggaaaatcgttctttatgttagtggtgaagaatcactaccacaaataaaagctcgtgctgaaagattaactgtccttcatgataatcttttatctatggcaacatctcaagttgaagatatccttcctctacttaatacatctgaagctccagacttactt

SEQ ID NO: 5244 - DNA, 200 bp, Lawsonia intracellularis
cttatagattccgtacaaacacttacttcaagtaatgcagaaggattacctggcaatgttagccaagtaagagcagtagcaactgaacttgttgaagcatgtaaacaaggaaaaacaacagttatctttataggtcatgtaactaaagacggtaccctagcaggtccacgtctactagaacaccttgttgatacagttat

SEQ ID NO: 5245 - DNA, 200 bp, Lawsonia intracellularis
ctctcttgaaggagatcgaagacatatatttcgactattacgagttataaaaaatcgatttggacctaaccaagaacttttaatttttcaaatggctcaacatggtcttgaacctgttgctgacccttccacttattttttaggtgcaagagatcctagtttaagtggaacagctgttgttatgactattgatagccaaa

SEQ ID NO: 5246 - DNA, 200 bp, Lawsonia intracellularis
gaccattagccgtagaggtacaagcacttgttacaaaaagctatcttgctatcccacgccgaacaggcttaggctttgatgttaatcgactacatttaattcttgctgttttagaaaaacgtcttcgattaaattttagtaatgttgatatttatgtaaaaataggaggtggaataaaactccaagaaccaggaatagac

SEQ ID NO: 5247 - DNA, 200 bp, Lawsonia intracellularis
ttagcccttgttgctgctattctctcttccttctatgatgttcctttacctgaacgttctgtattctggggagaagtagatctaaatggtcaaatacgacctgttggctctcattctatccggctttcacaagcttctaaactaggatataatcctattttttaccctaagcatgaacaaagtggattagcaactgtcat

SEQ ID NO: 5248 - DNA, 200 bp, Lawsonia intracellularis
ggaacttcaacaatcattattaaaaaaaaaaaattaaaaattattttaaaatattagatgtataatcaataagatctttaaatccatatagaacttatagtaaagtcctattgcctttcttttaaatcagacctatccatattataacaagtgaaaattacatgactcaatcatcttataatccgatagaacaagaaggt

SEQ ID NO: 5249 - DNA, 200 bp, Lawsonia intracellularis
agccctgaattactacttcaggaaaagataaggcgtcctaagatgtaccaagttttgctacataacgataattataccacaatggaatttgttgtttctattctaatgaaaatatttcgcaaaacaatggaacaagctacttctattatgctctcagttcataggaaaggtattggtgttgctggtgtttatacacgtga

SEQ ID NO: 5250 - DNA, 200 bp, Lawsonia intracellularis
actagctgaaactaaagttaatacaacacatatgttagcaagagaggcaggatttcccctccgttgcacgcttcaggaggtagacgaatgattgggaaagaaatgcaagatgttatcaatattgctattactgaggttaataaacgccatcatgaatatctaaccctagaacatcttttatatggcattgtatccgaaac

SEQ ID NO: 5251 - DNA, 200 bp, Lawsonia intracellularis
aacaggccaaaaaattattgaaagttgcggtggcaatactgaatctattcgtgcacaacttgaacaatttttttctacttacttagatacacttgatgaagcaataccagaaagcgaaattccacaaacattagccatacaacgtgttcttgaaaataccatagctcatatccactcttcaggacgtacacaaatagaag

SEQ ID NO: 5252 - DNA, 200 bp, Lawsonia intracellularis
ttggagatgtacttgctgccttattagaggaagaagaatcatgggctgcttactgtctaaaaaaacaaggagtcacccgtattgctgtgttagaatttatttcttatggacttccacacagtgaacttggcaatgatgactttgtcaaaaaagcagaagaaagctctgaagaaaaaaatccattaacaaaatatacaatt

SEQ ID NO: 5253 - DNA, 200 bp, Lawsonia intracellularis
gaactcacacaaaaagctcgaaatggtgaaattgatcctcttgtaggtcgagatatggaaatctctcgtacaattgaagtccttgcccgtcggaaaaaaaataatcctctatatgtgggagatcctggcacaggaaaaacagctattgcagaaggacttgcgttacgcattatctctggaaatgttcctgaagaatttac

SEQ ID NO: 5254 - DNA, 200 bp, Lawsonia intracellularis
atcgtcacttatcttttctttagatatgggagcactgcttgctggagctcgttaccgtggagactttgaaggacgtattaaatctgttctttctgagctatcaaaacaaccaaaagctatattatttatagatgagatacataccattataggtgcaggctcgacaaatggaagtgctgtggatgctgctaacttactaa

SEQ ID NO: 5255 - DNA, 200 bp, Lawsonia intracellularis
aaccaatattaacaagtggtaagttacgctgtattggctcaactacacatgaagagtttcgtaaccactttgtcaaagatcgagctcttgctcgaaggtttcaacgaattgatattcatgaaccatctcaagatgactgtattgctatacttaaaggattacaatcacgttatgaaaagcatcataaagtgaaatataca

SEQ ID NO: 5256 - DNA, 200 bp, Lawsonia intracellularis
ccagcagcgttacatacagctgtaaaactatccgccagacatattacagatcggatgctaccagacaaagctattgatgtccttgatgaagcaggtgcagccgtacacttacgagcaggcaataaatcaaaagtattagttactagacaagatatagagaaagttatttctcgtatgacgggtattcctataaaaacagt

SEQ ID NO: 5257 - DNA, 200 bp, Lawsonia intracellularis
ctctggaaaagaaaaagatagattaaaaaatcttaaaaaagatttatcttcacatatttatggtcaaaatgaagctatcgataaagtaactaaagctatattccgctcaagagcaggactcaatagaggaaaccgtccttcaggatcctttttattttatggacctacaggtgtaggaaaaacagaattagctaaacaaa

SEQ ID NO: 5258 - DNA, 200 bp, Lawsonia intracellularis
ttgcagaaaaacttaatattgcttttcttagatttgatatgagtgagtacatggaaaaacattctgttgctcgactcattggttctcctccaggttatgtaggttttgaacaagggggacttttaacagaggctgtgaaaaaaacaccttattgtgtagttttacttgatgaaatagaaaaggcacatccagatatttat

SEQ ID NO: 5259 - DNA, 200 bp, Lawsonia intracellularis
aatattttattacaagttatggattatggaacactaacagataatactggtcgtaaaacagacttccataatgttatattaatcatgacttcaaatgctggcgcaagggaaatgggaataacaaatatgggatttgtatcagatgatacaaatacaatatctcataaaggacgcaaagcagtagaaagtgtttttagtcc

SEQ ID NO: 5260 - DNA, 200 bp, Lawsonia intracellularis
tgaatttcgtaacagattagatgcaatagtaccctttaataacctttctcctgaattaatgaaccatattgttgaaaaaaatataaaagaacttacaaaaggtcttgcagaaaaacgtgtttctgtcatgttatcttctgaagcaaaaaaatggcttgcccaaaaaggttatgacaaaaaattgggagcaaggccattac

SEQ ID NO: 5261 - DNA, 200 bp, Lawsonia intracellularis
aacggctattaagggaatctcttgaagatcaacttgcagaagaaattctttttggaaaattagtcaaaggtggacgtgttactgtaaaaccaccacttgaagaagacagtaagcttgttgttatgcttgaataactttttataaaacatatttattttgtagtaattgattcttatataaggagtttttactataatatt

SEQ ID NO: 5262 - DNA, 200 bp, Lawsonia intracellularis
tcttaagatctattaggaaaaacatcttatgctctctgctctttccaatgatcctatgtattttcctcctcttgaaacagcctttgacaatggactactggcttatggaggtgatctttcccctcaacggttattatctgcatatacaaaaggaattttcccctggtatgacaataactcacctattctctggtggtctc

SEQ ID NO: 5263 - DNA, 200 bp, Lawsonia intracellularis
ctgatcctcgatgtattttactacctgaaaactttcgaattcctaagactatacagcgtgaacttaaaaaatgtactttttctgttacaataaataacgccttcacagaagtcattacagcttgtgcaactctacctagaacaaaacaaaaaggcacatggattacacaagatatgaagatggcatatatccaactacat

SEQ ID NO: 5264 - DNA, 200 bp, Lawsonia intracellularis
aaactaggattttctcattctatagaagtttgggataattctactcttgtaggaggattatatggtgtagcattagggaaagcattttttggtgaatcaatgtttcacattgctccacatgcctcaaaacttgcgttagtatggcttgcacaatacctgtggtcatataattttgattttatcgactgtcaaatgcctac

SEQ ID NO: 5265 - DNA, 200 bp, Lawsonia intracellularis
tacacatataatgagatatggcgcaacactcatttctcgtaatgaatttcttactcgactgacaattgctgttactactggaacaagtcaggcttccacaaaagaagccctataatgactactaataaaaggtaaacaatcgtccttccccatttaaaagaaactatttttacctcatctttaacactttcttcaaagtc

SEQ ID NO: 5266 - DNA, 200 bp, Lawsonia intracellularis
ttctgtagatgtttttctattaagttccataatcccctcagtcagttaataacatctcattttgatacattatagacaacatacctattgttattatcactcactatatatgtaataaaaattatttattagcttttatttggattaatctctagtatgttagagtttcttgtttgaacccactgcctcttcaaagactc

SEQ ID NO: 5267 - DNA, 200 bp, Lawsonia intracellularis
agcctcactacaacaacttgagcatgctcctctaggaaacaaaagacaaagagcttcatctagacaggtagattttgtttctattgctgtcaaaccattacaagttttacataaacgtatacgttcatattgagtatcatgtatcatatctgtgtcataatatatagtcctatttcgaacccaccaacaaccatcttgtt

SEQ ID NO: 5268 - DNA, 200 bp, Lawsonia intracellularis
ggccatcataaggttttactggtggataaaaatactgactcagagcttgttcacacaccttttttattgtttctgtaactcttttaggttgacaaatatctactttatcaagatcaggttcttgtaaataagaaaaaggtaaccctgccaatgcaagacaaatacctaaattcacataaggcaaagcaccctgtatggaa

SEQ ID NO: 5269 - DNA, 200 bp, Lawsonia intracellularis
taaccaccttctaatacagcaatatctggtttcaacatttgggtcatacatgcatacccttcagctgtaagatacatatttgtcaaaggatctgtatagtggttatcctgaccagctgagttaataataatatcaggctgaaattcatctaaaataggtaacacaacatgctccatagcatataaatacccctcattccc

SEQ ID NO: 5270 - DNA, 200 bp, Lawsonia intracellularis
tgttcctggaggaagagggatgttcacggtttttcccagtgctgcaggtcctcctacctcttctaaaaaccctgtccctggataagttgtacgaccatcttgatgtaatgaaataaaaaggacattaggatcattccaataaatatcttgtgtcccatctccatggtggcaatcagtgtctacaatagcaattttttgtt

SEQ ID NO: 5271 - DNA, 200 bp, Lawsonia intracellularis
tcttatatgtctgccgtatatgttcaaccattactgcttcaatattaatattacagaaacctctattaccatatgttaccctcatagcatgatgacctggaggacgtataatagcaaaagctcgttcaacctctcctgtcagtaccaatttactagcatgaatagctcctccagctgaagctaagtgagaatttgaacaa

SEQ ID NO: 5272 - DNA, 200 bp, Lawsonia intracellularis
actgctcctacatttggcaaacaaaaatgaacactttctatatcacaatatgttgagagactaggttgatattcttgtataccaggaatatcaaatattccctcttcatagagttgatcttgtgtatacaacaatcgctcttcacgctcaggatgagttggactaatagcccaatcaaaagcagggaaaaaaacaacgcc

SEQ ID NO: 5273 - DNA, 200 bp, Lawsonia intracellularis
aagtttatgttgaacatttggaaacatatagctcctatcaagtccaaccaatagtataaaatattctataaaaaattatgaatacaatccaaaagacaacttattattcttatactgtaatctatatattttcactattattatgtaacgatatctaaaataacgcttataactagtgtatctcatactataccttatca

SEQ ID NO: 5274 - DNA, 200 bp, Lawsonia intracellularis
tttataaataacgatcttcagccattaaataatgttggacataatccataatcccttcttcaagactatggaaggacacatcacacccaactttctggagccaattcatatctgcctgagtaaaatattggtatttccctttcagttgatcaggcatatcgacataacgaatatcaggctttttattcatagcgataaat

SEQ ID NO: 5275 - DNA, 200 bp, Lawsonia intracellularis
acagcattgagaagatcattccatgttcgtgcagtcccagaaccaacattaaaaataccatttacttcatgatgttcaaacaaccaatacattacctttacgcaatctttaacataaacaaaatctctcatttgtccaccatcggcataatctggatgatctgacttaaacaggctgaaaaaagaagaggttgttatttg

SEQ ID NO: 5276 - DNA, 200 bp, Lawsonia intracellularis
ctcataagacttacaaacaacacttctcatatcacccttatgatattcatttggaccataaacgttaaaaaatttaaggtttacaatctgattaagtaagccctcacgatatgcccaaagatcaaatagctgttttgaatagccatacatgttaagtggtttaagcgccaaagtagtaagcaaattatcagaaaaacctt

SEQ ID NO: 5277 - DNA, 200 bp, Lawsonia intracellularis
tagaaccatccccatatgtagcagcactactagcattaataaaccttgctccattctccagtgcataacgacaaaccatttgagtataatgaaaattattttccatcaaaaaatcagcatttcgttctgttgttgaagagcaggcacccatatgaaatattgctctaatatcttctggagctttacctttctgaatcaaa

SEQ ID NO: 5278 - DNA, 200 bp, Lawsonia intracellularis
tgacggaactcatctctatgtatgtagtctttaaatcgacggttaacaagattatgccacttatcacttattgctagattatcaacaacaagaatatcatctataccaacttcattaagaagccaaatcatagcactacctataaaaccagaaccacctgtaactatatacatgaaaagtcctccatcaataattgaata

SEQ ID NO: 5279 - DNA, 200 bp, Lawsonia intracellularis
tattatttgataatatcaaaaaatctcctgaccttactatattactaagtaatatcatccattagtttatataataaaatattactaatataatatttactctacccttagtgattaactaacaaaacttactctttagtataagctacctcaatagcaaattcttcatcacttttatgttcaattggctttaagtgaat

SEQ ID NO: 5280 - DNA, 200 bp, Lawsonia intracellularis
aaaaggtgcgtttaatctataagattgtaacttccatattgcatccacaaggagctctataccttcacctgtttctgctgaaataaaatatattatctttccactagattctgcaacttgttttatgtgtgataatttttcaggttgtaatacatcaattttattaacaaccaataattgggtacgttgcattaaagtat

SEQ ID NO: 5281 - DNA, 200 bp, Lawsonia intracellularis
gatcaaattcttttaactcttcatttacgatgtcgaatcctaaccatgggttatcctcatcaatatcttcactacttaaaacatgaattaaaaaacgtgttctctcaatatgtttaagaaattgatgaccaaggccttgtcccttacatgcaccctcaattaatcctgggatatcagcaaggacaagccttttatctgga

SEQ ID NO: 5282 - DNA, 200 bp, Lawsonia intracellularis
tcaagattatcgatcattactccaagattagggttaagtgttgtaaaaggataagcagctattttaggttgtgcagcagaaagttttgatattaatgtagatttacctgcattaggtagccctataattcctgcatcagctaaaattttcaactctaacctgagatacttctcctcccccatttcgcccttttgtgcaaa

SEQ ID NO: 5283 - DNA, 200 bp, Lawsonia intracellularis
tcgaggtgttcgcattgttgatgatttaaaatgctcatttccttttcctcctcgaccacctcttgcaattaagaattcaactcctggtctatcaagatcaactaaaaaatattctttatctaatagttgctcaaaaataattgtacctacaggtaaatgaagaatcaaatcttccccttttttaccatgacgctggctcc

SEQ ID NO: 5284 - DNA, 200 bp, Lawsonia intracellularis
ctttaccaccttctccattttgagctctatagtgacgttgcacacgaaaatcataaagggttaacaaacgtgaatcagctttaaaaattatattacctccatctcctccatcccctccattaggtccacctttaggtataaacttttcgcgtctaaatgaaacacatccatttccaccttttcctgcgctcacgctaata

SEQ ID NO: 5285 - DNA, 200 bp, Lawsonia intracellularis
gttacttcatcaacaaaacgcatgattatcctttcaataacaaatatctattcaatactgttactaacttgtttactgttttttctaaaaaattacctggctaattattatagttatatctagattaataaaaaaggaagaagtcattacactccttccttattaataaaatcctggaataattattatacggtgggttg

SEQ ID NO: 5286 - DNA, 200 bp, Lawsonia intracellularis
tatatgcactctactatatcttttacatttacgaaaatatgtttcataagttactataccattaacttttgcaaataaagtatagtctcttcccattccaacattttctccaggatgaatttttgtacctagttgacgaacaaggatattgcctgccaagactttttggccgccaaaacgctttataccacgacgttgtc

SEQ ID NO: 5287 - DNA, 200 bp, Lawsonia intracellularis
ctggactatctctaccattgcgagaacttccaccagctttcttatgggccattttaatatctccttaaagctgaatacctgttacttttagagctgtatagtcttgacgatgaccttggagtttacgtgagtcatttcttctccactttttaaaaacaagaatttttttatcacgaccatgctcaagaactttagctata

SEQ ID NO: 5288 - DNA, 200 bp, Lawsonia intracellularis
actttagcattattaatatatggtgttccaatttgaggagatgaaccaccaatcataaaaattttatcaaaaaaaatttctgttccaacttcagcgtctattttagaaacaaaaattttagaaccctcttcaacacagaattgttttccaccagcttcaataattgcgtacataaataatgtgcctcccaaaaaagacaa

SEQ ID NO: 5289 - DNA, 200 bp, Lawsonia intracellularis
gaaatactaatttgatattttcaatattgtcaagtaggaactttatctttagaatgttagatgtaacaatttttttagaaaaaaaatattttcaatacaataggaaaagaggaaaaaaaaaagatttttagaaaaaatttttatttctccaaaaaatgcaaaaatataaaaaattctaataggatagaagttattactgt

SEQ ID NO: 5290 - DNA, 200 bp, Lawsonia intracellularis
attgattttcaagacttacttaaaaatttttataaaaaaatttgcattcccctcttcccaattcccatagagaagattatttatcctaacgattggtggacgctaagtccctgctgttttgattatatatcaaatgttgaaacaaattttgtttagtttctttttgtactctaaaaagaagacaaaaaattctttataaa

SEQ ID NO: 5291 - DNA, 200 bp, Lawsonia intracellularis
ctgtacactctaaacaaaatagttcacaataaacagcaatacattataattaattggaggatactattgtcatgaacctgaaacctttgaatgaccgtgttttagtaaaacgtcttgaatctgaagaaaaaacagctggtggactctatatccctgatactgctaaagaaaaaccatctcgtggtgaagttgttgctgtt

SEQ ID NO: 5292 - DNA, 200 bp, Lawsonia intracellularis
ggacctggtaaacatacagatgatggtaaattaatacctatggctgtaaaagcaggagatacagttctttttaataagtatgcaggaacagaagtaaagcttgatggtgtagagcatctagttatgcgtgaagatgacatcctagctgttattactggagaaactggccgcaagtgaaaaaggcgtaaataaaaagatcg

SEQ ID NO: 5293 - DNA, 200 bp, Lawsonia intracellularis
gtgatctttaataattttattcagttataatgaaaacactaattacacgcactctctgagaattttctcagaaaactatatttaacaattctaaaatcgatatgtttttaggaggaaaaccctaatggcttctaaagaaatcctttttgatgctaaagcccgtgaaaaactttcacgaggtgtagataaacttgcaaatg

SEQ ID NO: 5294 - DNA, 200 bp, Lawsonia intracellularis
ctgttaaagtaacacttggacctaaaggccgtaatgtcgttattgaaaagtcttttggttccccagttattacaaaagatggtgtatctgttgcaaaagaaattgaacttgaagataagtttgaaaatatgggcgctcaaatggttaaagaagtagcttccaaaactagcgatattgctggtgatggaactacaacagca

SEQ ID NO: 5295 - DNA, 200 bp, Lawsonia intracellularis
acagtccttgcacaagctatttatcgtgaaggtgtaaaacttgtagcagctggtcgtaatcctatggccattaaacgtggcatagataaagctgttgttgctgttactaaagaactaagcgacattacaaagcctactcgtgaccaaaaagaaatagctcaagttggaaccatttctgcaaactctgatacaacaatagg

SEQ ID NO: 5296 - DNA, 200 bp, Lawsonia intracellularis
taatatcatagctgaagctatggctaaagttggaaaagaaggtgttatcacagttgaggaagctaaaggtcttgaaactacattagatgtggttgaaggaatgaagtttgaccgtggctacctctctccatactttgtaactaatcctgagaaaatggtttgtgaacttgataacccttatatcctttgtaatgagaaaa

SEQ ID NO: 5297 - DNA, 200 bp, Lawsonia intracellularis
agattactagcatgaaagacatgctaccaatcttagaacaagttgctaaagtaaaccgtccactccttattattgctgaagacgtagaaggtgaagcacttgcaacacttgtagtcaataagctccgtggagcactccaagttgtagccgtaaaagctcctggttttggtgaacgccgtaaagctatgcttgaagatatt

SEQ ID NO: 5298 - DNA, 200 bp, Lawsonia intracellularis
gctatccttactggaggagaagcaatatttgaagatcgtggtataaagcttgaaaatgtaagcttgtcttctttaggaacagctaaacgtgtagttattgacaaagaaaatactactatcgttgatggtgctggaaaatcagaagatattaaagctcgagttaaacaaattcgtgcacaaattgaagaaacaagctcaga

SEQ ID NO: 5299 - DNA, 200 bp, Lawsonia intracellularis
ttatgatcgtgaaaaacttcaagaacgtcttgcaaaacttgttggtggagtagctgttatccatgttggagctgctactgaaactgaaatgaaagagaagaaggatcgtgtagaagatgctctaaatgcaacaagagctgcggttgaagaaggtattgtccctggtggtggtactgcttttgtccgctccattaaagtcc

SEQ ID NO: 5300 - DNA, 200 bp, Lawsonia intracellularis
ttgatgatattaaacctgctgatgatgatgaacttgctggacttaatatcatccgtcgttctcttgaagagcctttacgtcaaattgctgcaaatgctggctatgaaggttctattgttgtagaaaaagttcgtgaagcaaaagatggttttggatttaatgctgcatcaggagaatatgaagaccttattaaagctggt

SEQ ID NO: 5301 - DNA, 200 bp, Lawsonia intracellularis
gtcattgatcctaaaaaagttacacgtattgcattacaaaatgcagcatcagtagcctccttacttctaactacagaatgcgctattgctgaaaaaccagaacctaaaaaagatatgcctatgcctggcggtggtatgggtggtatgggtggtatggacggtatgtactagtcctatcttcagtacaacttagatgtata

SEQ ID NO: 5302 - DNA, 200 bp, Lawsonia intracellularis
aaaaccccagaagcaatgcttccggggttttatactttcagcataaaaaattaatatttaatatacagacacattattttggtatttattatttattatgatcaaatatatagactggatacaaaaaacaacaatgatgtttaaaaaggcagggatagattcaccaaaactctctgcagaacttatattaagtcatgttt

SEQ ID NO: 5303 - DNA, 200 bp, Lawsonia intracellularis
taaatattacacgattacaaataataatgactccttttgaacctattccaactaatagctactcaacgcttaatgatatcatgttaagaagactccatggagaaccaattgcatatctcacagggaaaaaagaatttttttcacgagaatttaaagtcactcaagccacacttatccctcgcccagagacagagttactt

SEQ ID NO: 5304 - DNA, 200 bp, Lawsonia intracellularis
atagaatttgtattaaaccatattaacccaacacaacaaatatactttgcagacttaggtacaggtagtgggtgtattgcaattacactagctgctgaaagaaaaaattggttaggtattgctactgatatctctagtgaagcattaaaaatagctaaacttaatagtttaaaaaataacactcatagtcaactacagtt

SEQ ID NO: 5305 - DNA, 200 bp, Lawsonia intracellularis
tcttcaatcagattttacacaaccactctgtctaccctcttcattagacttatatatcagtaatcctccatatataagtgaaaatgaactgacctctcttccgcatgaagtaatatcttttgaacctaaaatagctcttacaccacataaatgtattcatcttgatgaaataaataccgttttacactgctataaaaaaa

SEQ ID NO: 5306 - DNA, 200 bp, Lawsonia intracellularis
ttattacccaagcagagatatcccttaagcctggaggaataataattttagaacatggagcaacacaagcagaagctatcttattgttgttaaaaaacaacatatggacaaatgtaataagtcatactgatcttacaaataaaaatcgttttattacagcatataagtataaaatataacttaattatgttgtaaaaaaa

SEQ ID NO: 5307 - DNA, 200 bp, Lawsonia intracellularis
caaaaaataaaaataagatataaatattttttttaataaaattaagcaattactaatatctttttttggatcgtttattgcataagaaactttggaggataactatgcaacaaacaaccattcaacgttcaattacattttcaggtataggtgtacatagtggccaatgtcttaatgtcacgttacaccctgcatctgaa

SEQ ID NO: 5308 - DNA, 200 bp, Lawsonia intracellularis
aatactggtattgtttttgaagtgataactggagatactcgccatactcttatcccctctccttctgctgtgatagctactaaattagcaaccactattggtaataaaaatataacaatatcaacagttgaacatcttcttgcttccattagaggccttgaaattgataacatccgcatttgtgttgaaggtgcagaaat

SEQ ID NO: 5309 - DNA, 200 bp, Lawsonia intracellularis
acctattatggatggttctgctaagatattcactaatgaattactccaagcagggattaaatatcttccagcaacaaaaaaaattttacaagtgattaaacccgtcgaattcattaagggagagaaacgtattcgtgcattaccgtataatggattcaaactagattatactattaattacatacatccaattattggcc

SEQ ID NO: 5310 - DNA, 200 bp, Lawsonia intracellularis
accaacgacttgtattagatgttacaccaacgacctttctttcaatagctaatgccagaacttatggctttcttaaagatgttgaacaaatgctaaaaaatggcttagctcaaggtggctctcttgagaatgctattgtacttgattctacaaaagttattaatcctgaaggattacgttatcctgatgaatttgttcgc

SEQ ID NO: 5311 - DNA, 200 bp, Lawsonia intracellularis
cataaagcccttgatttcattggtgatatggctatgatgcatctacctcttcaaggatattttgaaatatattgctcaggtcatcaacataacaaccaattccttcataaactacaggatgaaaatgcattagcccttgtaacacttgaaggagaaaaaacacaaaatctctaccaaaatattacaccactatataatga

SEQ ID NO: 5312 - DNA, 200 bp, Lawsonia intracellularis
tgtattagctctactttaataaaaggaaaatgtgtaatctccatcctactacataatatttagtatctgttaagttacataattcaatatcatatgaatgcatcacgctctcctattatacttcttccagaggcactacaaaaccaaattgctgcaggtgaagttgtagaacgtcctgctagtattattaaagaattagt

SEQ ID NO: 5313 - DNA, 200 bp, Lawsonia intracellularis
agaaaacagccttgatgcaaaagcaacagatattgaagtaataatggaaaatggtggacatacatttatccaagtccgtgacaatggttttggtattcccccagcagaattaagattagcccttactcgccatgctactaacaaaataaaagatttaggagacatatggaaaatccattcgtttggatttcgtggtgaag

SEQ ID NO: 5314 - DNA, 200 bp, Lawsonia intracellularis
cccttcctagtattgcatctgtatcttcttttaaaatagaatctgcctatacaaaagaatctaacaatactgaagctgcatttctgcaaatcaagcatgggaaaatagaaaaagagggtcctagctctctttacaaagggacgattattactgttcaagatctatttgctactgtccctgctcgccttaaatttcttaaa

SEQ ID NO: 5315 - DNA, 200 bp, Lawsonia intracellularis
agtcctgtcacagagcaaaaacgtgctcaagaaattttttcccgtttagcattaactactaatacaactatgacccttttttcaggagcaagagagcttttaaaatttcctgcagcacattctttacatcaacgccttaaaatcatttggccagaagaattgacatctaaccttatacctgttgataaaacaacacatga

SEQ ID NO: 5316 - DNA, 200 bp, Lawsonia intracellularis
cattagaatacatgggctaacttcaccaccaactcaaacacaactccgttcagacagggttcttctctatgtaaatggtcggacactcaacgataaacttatattgcgtgctatttttgaagcttataaaggtcggcttatctctaaagaatatcctcaagcagtacttttcattgaaatttctcctgaattaatagatg

SEQ ID NO: 5317 - DNA, 200 bp, Lawsonia intracellularis
taaacgttcatcctgcaaaaactgaagttcgatttagagatgaaaaaagtatattctctgctattagcactgcactaaaagaagctattaacaaaactataccaagcttttctttacagcaaactgatacagacatacatccaaaaggattttggggtgaagcagatcaagaatatatctttcctataaagaaaaattct

SEQ ID NO: 5318 - DNA, 200 bp, Lawsonia intracellularis
aacatccaccctacacaaactgaagtttgtactacacaatcaacaacaactgactctcatggtttctcattacaacatatgttacaaaatacgtttgtccttgagccagattgtcaacaatctttatctgctaaagaatctacttataccttagcatcatcttattcatctcatccttcagataactcttctttactacc

SEQ ID NO: 5319 - DNA, 200 bp, Lawsonia intracellularis
taaccttacatcaaacagtacagattccaacaaagaaaatgagatctcaattaaatatatagataaaaaaatgtgtattgggccctatcactacttaggacaaataggggatacctatcttattcttgaagatataaggaaaaaaaatgaacaagctgagcttattatccttgatcagcatgctgtccatgaacgtattt

SEQ ID NO: 5320 - DNA, 200 bp, Lawsonia intracellularis
tagcagaaaaatttcgtaatggaagtttaattaaccagtctcaacagcttgttttacctattcaattaaaactgcactactcagaacaagaagagctccaagaaatcgctaactccctaacttcccttggatttatattctctcttaaaggagatattcttcatgttgagtctatccctccactacttgatcgtagtcaa

SEQ ID NO: 5321 - DNA, 200 bp, Lawsonia intracellularis
gcaacaataattcttcgaaaagccctctcaaggcaacaagaaaatatagaaaagctttggatctcaatggcatgtaaagctgctattaaagctggcttacctctacctccagatgaagctgcattacttattactcaatggatttctatagaaaaacgtgaaaactgccctcatggacgaccctgtgtacttgtttggac

SEQ ID NO: 5322 - DNA, 200 bp, Lawsonia intracellularis
aatccaagatttagataaactatttaagcgtagaagctaattttactttcaataatatctataaattattatcgacgtccttcaataattctcatatctcctggtgctgtcatcaatactgaatgctgaatatctatttccccttctgcaggaagagtcattttccataaatacatatgatcttctattattggcttagg

SEQ ID NO: 5323 - DNA, 200 bp, Lawsonia intracellularis
attagactgtgtagtgataataataccaatatctcctgactgaggttctggttcttcaacaaccactttaacaggtactgtatgatcattacaaactttaatattccagctccaactatgactttgctttttatctaaaaatccatcacgtccactctgacttttatccaagatcatttgggctgtgactctaggatcga

SEQ ID NO: 5324 - DNA, 200 bp, Lawsonia intracellularis
caccaaaataaatatgattttcttcactacgtaaagtaaagtaaccattccccaccacttttccatcaaccataaattgagcagagccaggaattaaatctacagagctaggaatatcaatatttgcgacaagatatgaatgaggttgtactgatggtcttaacaatctaaaaaattttgcatcccaatcatttttatat

SEQ ID NO: 5325 - DNA, 200 bp, Lawsonia intracellularis
aacataaaacgcatcaccattcctgcaggaactgtaactttaccaagagaccaagttgtaaatgtaggctcttcttgggcgtgaactataggcacagatgattttgccaaatacattgcattatctgctataggagacacttcttgtccttgacgatatgtttgtataggggcaggtagtatcttccagtcaggtaaatt

SEQ ID NO: 5326 - DNA, 200 bp, Lawsonia intracellularis
aggaggcactaacgcactcccaatatttactgacgccaaagttatatctgcatttctccagtcttgcccagaagcctggcgaatttctgcttcttgaacaacttggacaatacctttctctggtaatgcatcaaaacgataaataggattccacccacaatcagaaagcatatatccatattgaactatcacttgcttat

SEQ ID NO: 5327 - DNA, 200 bp, Lawsonia intracellularis
taggttttttgtttgttttatctggtctaataactgctgtaatagctgtagcatatgtatttttcccaccagcatccacaatggctttttctaataactctaattcatacaaagctttctttaaagctggctctatagttgactctgcaacataaagttcctcaatttttgatcccatcattgaatcaaattttttaatt

SEQ ID NO: 5328 - DNA, 200 bp, Lawsonia intracellularis
tcttcaatagaacgactaggacattcaggattactccaaagagcaatttttgcttttactgctgcaagtttcccacgaatcaaagcaacttcttgtactgcctttgtataacgttctcgaattttagcaactacaggactatcaatactagcaatgggggttgtttcaatacttcctataaattgtccctcaatacttaa

SEQ ID NO: 5329 - DNA, 200 bp, Lawsonia intracellularis
aagtaaagagccaagttgtgctcctgcaggaagttcaaaatacactttatcatcttgaacaggtaactcttcaacaacctggatccacccaccagtaggatataaagtgatagccacagggttagttggagcagccatagcaataatagttctactaagtacatttatccctattaaaaaaagaaaaaattgtatcttca

SEQ ID NO: 5330 - DNA, 200 bp, Lawsonia intracellularis
aactagattgcatgacttcctccttaattatataaatagagtaatttttaggccactaaaaaataattattcttattctttaaactatgttatacgtagccatgacctaatgtactccacaacattttttatactttttaccacttccacaaggacataaatcattccgtccaacacgatcagtttttttcacttgaaac

SEQ ID NO: 5331 - DNA, 200 bp, Lawsonia intracellularis
tttgtttctttctcatgactagctggataccataagtcattaattggctcatgttgaaaaaaattatcttcttttttttctaaatgtaaccttgtaaaagtacgaaagactccttctctaatattagcaagcaattcctggaaaagtacaaagccttcttttttatactctaattttggatctctctgaccataaccacg

SEQ ID NO: 5332 - DNA, 200 bp, Lawsonia intracellularis
cagtcctataccttctcgaagaaaatccatattccttaaatgatctttccaacaacgatcaagttcttcaagaagcacataacgtagcaaatcattatatgcctctccagccttagacttcaacttttcaaacatagaaagaattaatgtctttgcttgttcctttgttggaagggtgttatctatagacattacctgtg

SEQ ID NO: 5333 - DNA, 200 bp, Lawsonia intracellularis
aaagattcataatatcatataactgggtatgaatgcttttatttaattcattattatcattatcttctaactctatataaatatcacttaataattcatctaaatactctaaaataatatccattggctctggatcattcatgatattgtgacgtaatgtataaattactgtccgctgctgattcataacattatcataa

SEQ ID NO: 5334 - DNA, 200 bp, Lawsonia intracellularis
tctaatagacttttacgaatttcaaagtgatgtccttcaacacgtttttgtgcactttcaatcgcccgagataccataatattttcaataggttcaccttcttccatacctaatctttgcattagccctgaaagcttatcagaaccaaaaagtctcattaaatcatcttcaagagaaagataaaaacgtgatgatccagg

SEQ ID NO: 5335 - DNA, 200 bp, Lawsonia intracellularis
atcaccttgacgccctgctcgaccacgtaactgattatcaatccttctactttcatgacgttctgttcctaaaatatgtaatcccccaagctcaacaacactatctccaagaacgatatctgttccacggccagccatgtttgtagcaatagttactttacctacttgtccagcttgagcaataatttcagcctcttgcg

SEQ ID NO: 5336 - DNA, 200 bp, Lawsonia intracellularis
catgatgctttgcattaaggacattatgagatatattttttttacggagcatagaagaaataagctcagaggtttctatagatatagtccctactaatacaggttgcccttttttatgaagctcaatgatagcttttacaatagcatcaaatttttccttacgtgtacgataaattacatcagaatgatctttgcgaatc

SEQ ID NO: 5337 - DNA, 200 bp, Lawsonia intracellularis
ataggtttattagaaggaataacaactacttctaatccataaatttgtgcaaactctacagcctctgtatctgctgtaccagtcatccctgcaagcttattgtacatacgaaagtagttttggaaagtgatactagccaaagtctggttttcagcagcaacagtaaccatctcttttgcttcaagtgcttggtgaagccc

SEQ ID NO: 5338 - DNA, 200 bp, Lawsonia intracellularis
atcactaaaacgtcgacctggcataagccgtcctgtaaactcatcaacaatgacaacttgatcgtctttaacaatatagtcaacgtcacgacgaaaaatataatgtgctttcaaagcctgtagcacatgatgctgtatagctatgttactaggatcatacatattatctataccaagggctttttctacttgcacagcac

SEQ ID NO: 5339 - DNA, 200 bp, Lawsonia intracellularis
cttcatcgctaagaatgactacttttcctttttcatcaatagaaaaatcctgttgtggcttaagattacgtataattttatctatctgagtatacatagttgtagattgttctgacccaccagagattataagcggtgtacgagcttcatctataaggatagaatctacttcatctataatagcaaaaaagtgtccacgt

SEQ ID NO: 5340 - DNA, 200 bp, Lawsonia intracellularis
tgtacaagctgattaggataaaacttcatattatcacgtaaaaaatcaaatccaaattcattattagtaccataagtaatatcagcagcatatgcttccttacgagcatcatcagaaagccctgatgtcaacacacctgttgttaaacctagagcactatataatgcacccatccattcagcatctctctgtgcaagata

SEQ ID NO: 5341 - DNA, 200 bp, Lawsonia intracellularis
gtcatttactgtgacaacatgtacccctttaccttcaagagcatttaaaacaacaggaagtgttgccattaaagttttcccttcccctgttttcatttctgctatcttacctctatgtaatgaaataccaccaatgagttgtacatcaaaatgtctcattcctaacaccctaaagcttgtttctcttacaagagcaaaaa

SEQ ID NO: 5342 - DNA, 200 bp, Lawsonia intracellularis
cttctggtaataactcatcaatagtacgcttaccttcttgtaattgttgcttaaatgtagctagttgtactgggatctctttatcagataaagctttcattgtggattcaagtgcattaatctgatctaatataggtgaaagactttttaaataacgatcatttttagagccaaaaatcttacgaataaaaaaactgaac

SEQ ID NO: 5343 - DNA, 200 bp, Lawsonia intracellularis
atgaaaactccatgaggtataactctgtcactttatttgattattataatagcaacagataacgactagctagtgtcctaaaaacaacaataacacactatatctttaatccatttttttgatgaatataattctttctaattagacttaacaaatacgtggaagctgatctccttccaacatatttaacaatcgatatc

SEQ ID NO: 5344 - DNA, 200 bp, Lawsonia intracellularis
caccaatcacagtgtgcaaaattacttgaccaggccttgttgttttcccagcatctgagacaaaacctatctttcttgcttcactaccctgtgggaatgatctcataacatctagtgctaactcctccttttctgatggtaaaatacaaagtaacttcccttcatttgcaagatataaagggtcaagccctaaaatatca

SEQ ID NO: 5345 - DNA, 200 bp, Lawsonia intracellularis
catccagatcttacaacgtcatgaataggcatcagtgactcttcaatataacaaacaacgctagactgtgaagcaatttcattaagtgtagtagcaagacctccacgtgttggatctcgtaatacgtgaatgtctctaacttcttgaataagttgctcaaccatcacatttaatggtgcactatcactttcaacttgact

SEQ ID NO: 5346 - DNA, 200 bp, Lawsonia intracellularis
taaaaagtctatcccttctcgttggccaaatacagttagtccatgatcaccaatagaaccacttacaataattacatctcctggctctgctcgactgcctgatggagcaggatcaaccaaaacttctccaataccagttgtattgataaaaattttatcacaacatcctctaggaacaacttttgtatcacctgtaataa

SEQ ID NO: 5347 - DNA, 200 bp, Lawsonia intracellularis
ctttaattgacgctgtatgagcagcttctgccatagatgctactatgcgctcaagaatatcaagctccaacccttcttccaaaataaatgcacatgttatatataatggtttagcacccaacatagatacatcgttaattgtcccatgaatagcaagagaaccaatattgcctccagggaaaaataatggtgtaatagta

SEQ ID NO: 5348 - DNA, 200 bp, Lawsonia intracellularis
taactatctgtacttatagctacaggtgacgaaagagagactatggcagcatcattaagggtccttagtatatcattatcaaaatatttaaggaatagacctgtaattaatcgctgtgaagctcgaccaccactaccacaatctaaaagtaaactatttgtcataactttcttctactattttaagatgtaataatagta

SEQ ID NO: 5349 - DNA, 200 bp, Lawsonia intracellularis
agatacactattgtagtgtacaatataaaatactgcaatcacttttactcgataattctatatgaattatcatagctatagatatactgagcatatattaattatacctattacagtttagatactgatttttctttttacttttaaagtcataatagagaaaataatagccacaatatttaatagactgaaaatccaaa

SEQ ID NO: 5350 - DNA, 200 bp, Lawsonia intracellularis
aattcatatccattgctgctgtaaatttatccatactttttgccgtaagtatttctcctccaaagtaaatattcattgttatagaaataataagcatactaagcagtaatccaaacgttctcattgttccaataagaccagcagcttgactcatatgtttactatctactgcactcataatagctgtcatattgggagag

SEQ ID NO: 5351 - DNA, 200 bp, Lawsonia intracellularis
gcaaaaagaccagcacctaaccccaagatcatttgtatatatgcaatttcaaatatattagagtgaatttcaagaattatagctaaaaatagtccaaccccacacataatcataccaacaatagcaatcttaatagctccaaaagcatctgcaagacgacctgcaatcggagaaataataacttgtacaaatggttgcaa

SEQ ID NO: 5352 - DNA, 200 bp, Lawsonia intracellularis
cgaaaggattaaacctgtcgttaatacactaaggccatagcctaactgtaaatataaactaaagtaaaaagctaaaccaaatatagaactatagtttattagtaatgcaaaaatactatataaaaaagcatgattatgaataagaaatttgatgtcaaggataggatgatcttcagttagctcaacctttaaaaaactac

SEQ ID NO: 5353 - DNA, 200 bp, Lawsonia intracellularis
caaaaaagataattcctatactcaaaaaaactattggccatattccatttaatatccatatcattcctatagataatgtactaatactaattgcgtataagatagaaccagtccaatcaaaagggtactctgcatcaatataccattcttcctttactgtgtatttcataagcaaccaagcaataagaccaataggaatc

SEQ ID NO: 5354 - DNA, 200 bp, Lawsonia intracellularis
attaagtaaaataaatatgaccaaccaaagaatttagccataatgcctgcaagacaaggactaagggatagtcctaggtaaattcctatagaagcaatacctagtgtttgtcctagtcgatcttttggagaacaattagttaatatagatagtccactagtgttcataagcgcagcaccaatagcttgaataaaccttaa

SEQ ID NO: 5355 - DNA, 200 bp, Lawsonia intracellularis
tataaaaaaaaatgtaatgttaggggaaaatggaagaatccctgaagtacaagtaaaaagtccaaggcctataagaaaaacccgacggagtcctaaaatatcactaatacggccagcaattaagtgaaagatagttaaagataaagcataaacagcattgataagacttaactctacagcagttgcattaaaatgcatac

SEQ ID NO: 5356 - DNA, 200 bp, Lawsonia intracellularis
caataacaggtaaaagtggtccaacaccagctaacatataaggcattataaactgagctgttgctactgctataataactgacttcaatgagtatgtttttctaggatttatcataataattatataaaaaaataaaataagataacaatctattggtaaaggaataactacaggtagtaatatatattatatcttttta

SEQ ID NO: 5357 - DNA, 200 bp, Lawsonia intracellularis
tagaatattaaaaaatagtaacaatacctataataattatattagcatgtataaaattacatatagttattgaaaaaacgtaactatataaatctatactaaactaatatagatttatatagttacgtaaacaaggttaagtgactgcctattaaaaaataaactatacttattaaccaaaaatttctgactctaaacct

SEQ ID NO: 5358 - DNA, 200 bp, Lawsonia intracellularis
aacatgttttgggcaatatccttactgtttatcttataattacctgactctatagcagccctaattgaagctaccttttcttctcttatatctatagagtgcatagcttctctatacacttctacatatagtttgcctttaggggaaagaattactttatcttcttgaggataaggttcccctgacgtagcatctgtttt

SEQ ID NO: 5359 - DNA, 200 bp, Lawsonia intracellularis
ccctctagctactttatttgatttagttatcaagtcaccctgactcgtaaccattccatatggattattatttacatctttgatatccatatttttcctcttaggaaaacattagtgctacaacatagtagtatttactttatccaagatcattgtccaagcaagacataatatctcagtttgtaattttgagcctactt

SEQ ID NO: 5360 - DNA, 200 bp, Lawsonia intracellularis
tttcccattcattattaactttcaccaatataacaacttcaggactctctgggggatattgaaaacaaattttattattaaacttctctattaattctttttgcacatcttgtaccacagatgaattataaccagtgataagaaaatttttaaaaaactctttagctactagtctaactaatattttcctttttattatc

SEQ ID NO: 5361 - DNA, 200 bp, Lawsonia intracellularis
ttagataaactaagcggctcttctattaagctaattgcttgacgataacgttctaaccttcgtgctgttactagttgttgttcatacttttttaacatattacgtgtctgaaaagaaattattttcataacaattctccttcattcactccatcggtaaaataagaagaaactttatgttaaactataaaagtgttataa

SEQ ID NO: 5362 - DNA, 200 bp, Lawsonia intracellularis
tcactttaataactatttgaactcattaaattaaagaaacatcattttggtataactcaactaacaaagaactatagtataattattaaatatatattataatacctcttggctattaaaaatagcatacataactctttaaaattataatgcttaatagactagatatactattttactttaaaaaaatataggggaat

SEQ ID NO: 5363 - DNA, 200 bp, Lawsonia intracellularis
ttatagctttttatatttattgtaatttttaataataactacttgcttttccagggcgctaatgtttactatagcaacattaactattttatttaattggagtttttactatgactcgtaaggatagaacagaaggtatatatagtcgacgagaggtacttgatgaaagtgaacgtcgtcaatattatcttattcaacta

SEQ ID NO: 5364 - DNA, 200 bp, Lawsonia intracellularis
aaagaattactttcatacgcctatcgctattctgaagacgtcaaaaaacgctttgatcgagcccaatttaatgttgaaaaatttaaaacactttctgatttaaaacatatccctatccttaaaaaaaaggaacttatttttcttcaatccattggccctaggttaggaggattacttacaaaagatattggtgatttaaa

SEQ ID NO: 5365 - DNA, 200 bp, Lawsonia intracellularis
acgtatttttctttctccaggtccaatttttgatccagaagatcgtactgaagactactgggggtatacagaagctttctactctgttggatttcgacctggagatgtagtacaagtaacttttaattatcacttatccccagctggacttatgtttgaagaacctctccgtatattagggtgtgcttctatacctgcag

SEQ ID NO: 5366 - DNA, 200 bp, Lawsonia intracellularis
gaccctcagacgcaggaacacaactggatatcatgcaaaaattacgagtatctggatatgttggtactgcaagttaccttatgcatttaacccaaaaagcagaagaaaaaggtattaacctccgtaaagatctttttcaagaagtagcctttgttactggagaacgtctgtcagaaaaaatgcgttcacaacttgagaaa

SEQ ID NO: 5367 - DNA, 200 bp, Lawsonia intracellularis
aaatttgatattatactacgtcaaggatatggcactgctgatgtaggatgtattggatatgaatgcttccataaaactggattacatatttctaatcgttgttatatagaaatttgccatcctgacacaggaattacccttaaagatggtgaggttggtgaaattgtagttacagcttttaataaaacatacccacttat

SEQ ID NO: 5368 - DNA, 200 bp, Lawsonia intracellularis
tcgacttgcaactggtgatctttcctatattgatcgctctccctgtatttgtggacgaagtagtccacggcttggtagtattgttggacgggtagatacaacagctcgaattaaaggaatgtttgtatatcctcatcaagtagagcaagtcatggctcgatttgaagatattaaacgttggcagattgaagttattaatc

SEQ ID NO: 5369 - DNA, 200 bp, Lawsonia intracellularis
ctgatggaatcgatgaaatgattctttatattgaagcaaataattttcatcaggaagaagaacttcttcatctctttagagaacgcatcaaattacgcccagaactaagaatactagttcctgggacattacctccacatattaaaccaattgaagataaacgagagtgggattaatatagtaagtcttccattacaact

SEQ ID NO: 5370 - DNA, 200 bp, Lawsonia intracellularis
agaggaaattacccacccatatatactaaataataaagagttttaactttaagttaaaactctttattatttagtaatatttttataccttttaaataaatattgtagctatacgttatttttactattatatttaattttaatattaaatatatttttttactgtatttactaatgaaacatattgtgtatacttaatg

SEQ ID NO: 5371 - DNA, 200 bp, Lawsonia intracellularis
ttagtattatttacttataaatatatagttttattactacaaaataatataaaatttgttattaataatagttataatacaatatatttatgataatagataagatatagtactatcgctatagtaaatatataaagtaatctatttaagttatatataatttatctattagtactgatagctgtttttagtatttatat

SEQ ID NO: 5372 - DNA, 200 bp, Lawsonia intracellularis
tataaaaaatgttaatgtaacatgagataggtaagataaagatacttctgcaaggtctattataagacacatttactgctacaaaaccttttaggagaagctaacatggctatgacattgacaaaagctgctatcgccaaaaagatttgttctaagtcaaacattagtcagcagagtgcaaaaaggagcttagatattat

SEQ ID NO: 5373 - DNA, 200 bp, Lawsonia intracellularis
gctttcaattatgaaaaaagcactcaagaccgaacatgaagtattattaagtggttttggtaaatttgaaactttcaagaaaaaaacaagaaaaggtcgtaatcctcaaacaggcgaagaaataactttaaaagaacatgatacccttacatttcgtatttctcgaaaatttaaagaacatatgaaaaaattacattaaa

SEQ ID NO: 5374 - DNA, 200 bp, Lawsonia intracellularis
aaaaaatcaatatttatatccatgaaggccaagtagagtatggctttcatggattataatgcatagtaataatatcctgacctaccctaataaaacatcaaaacacatcattaccacaaatcctaagataattgccatactggaagaatctccattaccagaagcataagactctggaacaacttcttctactacaacaa

SEQ ID NO: 5375 - DNA, 200 bp, Lawsonia intracellularis
aaatcatagcgcctgctgcaaaagccaatgcaaatggtagcaaagttgttacagtagtgacagcaagcgcaccaataataacagcaataggttcaacaataccggaaaataaaccaaaaagaaaagcttttttacgtgaatagccttctcttaataatggtccagagactgcaagaccttcaggaatattttgtaatcca

SEQ ID NO: 5376 - DNA, 200 bp, Lawsonia intracellularis
atacctaacattaaagaaatcgcactagataacgtagcttctggtgttcctaaccctgcagcaccaaaaacaacacctacagctaacccttcaggaatattatgtaatgtaatagcaagaacaagcaatgtactacgtggtaacttactttttctgccatctagaacaccttctacaatatgaatgtgtgggagaatata

SEQ ID NO: 5377 - DNA, 200 bp, Lawsonia intracellularis
atcaagtaatcgaaggaaagcagcacctaaaattactcctgaaccaacaggcactaatgaccatttcccaagatactcagacatttctagtgcaggttctaaaagtgaccaataagaggcagcaatcataatgcctccagcaaagccaagcattaagtcaagagtacgtctagaaaactctttagatataaagacaactg

SEQ ID NO: 5378 - DNA, 200 bp, Lawsonia intracellularis
cagcaccaactgtagtaaatccccaaatcactatccctgcaaggagagccattcctataggagtattaaaaaattgttctattatcatagtaaataactacgttacctatttagttaaataacacatatattaccacaaaataaaaaaataaatttcattcatgtgatccattaataggctgacaagaagagcaccagac

SEQ ID NO: 5379 - DNA, 200 bp, Lawsonia intracellularis
tgtcatccttccccctatacgtgttccttccaaatcttttttacaaactacacaaggcttcccaaaacgtccatatacattaagtgaattttgaaaagcaccaacattgccatcagctgccctgtaatctttaatagaactaccacaacttgcaatagcttctaataaaacttcttgcaatgcatgataaagtgtagcta

SEQ ID NO: 5380 - DNA, 200 bp, Lawsonia intracellularis
ttgactccatagataactgtgaaacagtagccataggtgaaatttgtgcacgaaaaagactttcatctgcataaatatttccacatccagcaattactctttgattcagtaataatgatttaatattacctctcctaccccgaaaacgttctataaacgttgaaacatctatctctaacggttctggacctaacgtattc

SEQ ID NO: 5381 - DNA, 200 bp, Lawsonia intracellularis
caaaatggccatactggttcttcagttgtcgataagatacggacatatccaaattttcttatatcttcaaaaaaaatagtattaccatcatcaagggaaaaactaactcgtgtatgtgtggttggacatctatcttgaggatacacaagaatacgtcctgtcatctttaaatgaatacataacgtataaacatgactatc

SEQ ID NO: 5382 - DNA, 200 bp, Lawsonia intracellularis
tttaataactaaaggaataagaaggagctttcctctcctaaaaggttttccaaatatagccccaataagtacatccagagatatatctccttgtacagaatcttggttatatacagtatagttcagacacattctgccattaattattggttccaatgttcgaacaatagtttcaacttctggaagttctggcatatcga

SEQ ID NO: 5383 - DNA, 200 bp, Lawsonia intracellularis
tatactaataattaaaaaccttctaaataaaactttagaaggttcaaatgacttttagtaaaaaattaactaatgaggggtaacagctgcaatagcaatcatatctgtatgtgctcttaacccatgtggttccctaatattaccaatcaaaatttcaccttttttagcagggaatgttccatcttctttaagaaaaacac

SEQ ID NO: 5384 - DNA, 200 bp, Lawsonia intracellularis
cttctccctcaataatatatatagcaagttcaccatctatatcacgatgatgaagaggtaattcttgcccttttttcaaattaaaatttaaaatataaaagcttgaacctttattaaccatttgttttttcatgctgatatcattaaattcagcattttcaataatatttaatgtgcgcatcttattacccctaagccta

SEQ ID NO: 5385 - DNA, 200 bp, Lawsonia intracellularis
tctaaggcttatcattatattataactctagctaggaattctccccaaatgaaccataatgtaaaaacatattttacttttttacttcatcagtaaaaataaaaaataccctacaaattaataaaactagtattggtaccgggagcgagacttgaactcgcaaggggttgcccccggcggattttgagtccgctgcgtct

SEQ ID NO: 5386 - DNA, 200 bp, Lawsonia intracellularis
accattccaccatcccggctttatttagtttttatggtataaatatctctttggtcaagtttataaatgctaaaaagaaaatgttaactaattgctattacaatttttaactttatattactaacggatataatctggaatattcaatataaggttgcgtgtaaatgtaaccattttgtctagcatccaaggaaatgcta

SEQ ID NO: 5387 - DNA, 200 bp, Lawsonia intracellularis
caagaagtgcaacaaaaatagacacaactttaggaataaatgttaatgtcatttcttgaatttgtgttgcagtttgaataacactcacaactatgccaacaaaaagtccaatccccaacattggcatagccattaacaaagccaactcaatagattgtcttgcaaaaccaatgacaaactctggggtcataattttctcc

SEQ ID NO: 5388 - DNA, 200 bp, Lawsonia intracellularis
ttataataaaactattccacagtagattataataaaaagctatttactaatgagccaataagtaagttccaaccatcaatcattacaaaaagcagtagcttaaaaggcatagaaaccatcataggaggtaacatcatcatacccatagcaagtaatacacttgagacaaccatatctactataagaaatggtatataaat

SEQ ID NO: 5389 - DNA, 200 bp, Lawsonia intracellularis
aagaaacccaatgataaaccctgtttttaattcactaataacataagcagcagaaagtaaaattgttgggacatcatctttatttttgggttgttccatcctagcaatagagtaaaaaatagatagatctttctcacgtgtatgtttaaataaaaacgtccgtaatggagcttgtgcacgtgttaatgcttctgaaaaac

SEQ ID NO: 5390 - DNA, 200 bp, Lawsonia intracellularis
ctaaacgttcatccaaatacggctgtagtgctgtatcattaatttgtttcccaacaggaaacattatgataacagtcataaaaatagctaaacttgcaagaatttgggtaggcggaatctgctgaatacccatagcttgtctaagaaaatgaaatactataataattcttgtaaaacttgtaacagtaagcataatggct

SEQ ID NO: 5391 - DNA, 200 bp, Lawsonia intracellularis
ggtgctaatgaaagcaccgttaacataaacaagatttctaataataaagaaactttctcaggttctgtctgtccaccagacagtgtaagttgtaaattaggtatagctatgtcttctgcagcttgtatacttaatggaaaaaacaagttaacagaaagaaagataataacacatattatacaaatggaatatttttcagg

SEQ ID NO: 5392 - DNA, 200 bp, Lawsonia intracellularis
aactttcagaatcatgttgctcggccccattcaacaagtgttcaaaaccctgagcatcacgttcattatatagtatagtatcttttaataaaataatatttttctctgtaataccaatcaaaaggcgtctatctaaaaattttataacagcaagacccttttttgctccaagtggtaactgagcttccatccttagtgca

SEQ ID NO: 5393 - DNA, 200 bp, Lawsonia intracellularis
tctcgaggaagagctgtaggagaaggaataaaattaaattttccataacggcgaaccagccaaactgctccccatagaccagcaagtaataaacacataaagcctattgcttgaaaataatttccccatgaaaaagtggcatctgcatgtgttgctacttcatttgctgtatggatcgcctgatctacgactgtatcaac

SEQ ID NO: 5394 - DNA, 200 bp, Lawsonia intracellularis
cttagaaaacttgtctacattacttcctttattttcttggacaacagctatagtagaaaaaagggaagaaataagatataaccatgccattgaatataatccccttttatcccttctatgctaactgttttacacgttcaataggactaataatatctgtaagccttacgccaaacttttcatttataacaacagcttca

SEQ ID NO: 5395 - DNA, 200 bp, Lawsonia intracellularis
cctcgtgctacaagtttcccattaacaaaaacttctagaggctctcctgctagcttatttaactcaacaacagaaccttgtccaagctgaagaagctcattaataagaagacgagtacgcccaagctctgcagaaacatctaagggtatatctaaaataaaatctaactctcgacgacttccctcaggtctaggagttct

SEQ ID NO: 5396 - DNA, 200 bp, Lawsonia intracellularis
tgcaatgtctgtcatatctttaaacgttgcttctattgcatgtgaaccaaaacctttttccttttcttcctgaacagcttgttgttctgtttctgccaaagcagaagcccatgcatcagcaagctcttcttcctcaacttttgcagattcttcctctgttttttcaagagaggcagcccattctgctgcaagctcttctt

SEQ ID NO: 5397 - DNA, 200 bp, Lawsonia intracellularis
ctgtagccataactacctcatattactgaataacaaagtctgtaaagtatatccgtacaactcttggttctcctaatatttgattaagcctagatgcaacttcattttttaataaaacttttccttctgcagaaacaagctcatctgaagttttacttgataatagtaaaataatagcatctcttactcgtgcactctgt

SEQ ID NO: 5398 - DNA, 200 bp, Lawsonia intracellularis
gttaaaagatttgttatagcttcttcagaacttaattcaacatccatccctattctcaaatatttactccctgaaggatcagcaagatttactgtaacagaaggaagagagacaggttttaagagtggttttggatctgtaggtgatgatccttttcctccttcttttttattagcattatcagattgctcctgcgatgt

SEQ ID NO: 5399 - DNA, 200 bp, Lawsonia intracellularis
tccagggttaccccctccctctaataaatgcttaaatgttgcatcagatcgtaaaaatagccaccaagaagcacctgtaatcacacctagtagtaataataacacaagtaaaataataaaaatttttaatccagagcgcttttttggttttcctcctgtgtcattattttcaggtaattcatctactggcattgaaatac

SEQ ID NO: 5400 - DNA, 200 bp, Lawsonia intracellularis
tccttcaaagtcaatttcaaagtcaatttacatcccaatagtaaaaatgatacctataaataatactctacactgtagataaatcaagtaataactctttgatattacagtcgtaataaagaaaaaatttcctctaattgtttaatcgatgcccaaaaatacttgtacctattcgaataagtgttgctccctcttttata

SEQ ID NO: 5401 - DNA, 200 bp, Lawsonia intracellularis
gcttggatataatcatttgacattcccatagataattctggtaaagtaatatctaataacacttctaatctatcacgcagctcacggagcttagtaaaataacaagaaacaacttttcctttatgagtaataggaggaagacacataagaccacacaacttaagtttaggtaatgataaaatagtttctgcaagaaaagg

SEQ ID NO: 5402 - DNA, 200 bp, Lawsonia intracellularis
taactcagctactgttatacctgctttctgtggttcatctcctatatttacttgaagtaaaattttttgacttggtccatcctctggaagacgggaagataatagttttgctaactttatagaatcaatagtatgaatatactcaaattgaccaacaacattctttattttatttgtttgaagtcttcctgtgaaatgcc

SEQ ID NO: 5403 - DNA, 200 bp, Lawsonia intracellularis
actctataggcagtccagaaagttctgattgtttatatatagcttcctgaacatagttttctccaaaagctttttgtccataattaaatacattcactattgtttttacaggatggaattttgaaatagcaataagttttactgattttttatcacgtccagagcttacaacggcttgctgaatttgatcatgtaaaaat

SEQ ID NO: 5404 - DNA, 200 bp, Lawsonia intracellularis
tctaatcgctcttttaaaaattcttcagatatcatcctatttcctctgtaccaaaaccaagttcatacaaaaactgattatcattaatccaactttcacggacctttacccataactctaaatgtactttcttccctaacaaagccttaatttctttacgtgccattgttcctatagatttaatcctttcgcctgcttgg

SEQ ID NO: 5405 - DNA, 200 bp, Lawsonia intracellularis
ccaatgaccatagctttatgtgaggctctagctacataaatgacagcatatatcaccacttggttctttctagattcttcatcccatttttctacttcaacagctacagcatagggaacttcttgatataactgctcaaataacttttcccgtattatttctgctaccatgaaacgcactggaactgtagaaagttgatc

SEQ ID NO: 5406 - DNA, 200 bp, Lawsonia intracellularis
ctcagggaatattgcctcaccttcaggcaacttcaaacaaattgtatctaataatttatctgtaccatttttataacgtgctgaaataggaaagatttctgccgttgggaaatactctccaagtttagctaacattggtaacatacgagacttatcatgaaatacatcaattttatttactacaataactataggacgta

SEQ ID NO: 5407 - DNA, 200 bp, Lawsonia intracellularis
cttcttgtctcaaaacttcaacaaaaggctcaatatccctatccataaggtcaggtttttttagatataatccaccatctaaaacacaaactatactatcagcaatagcaagaccttgccatgcagattgcaacataagctttccaagctgaccctgtacatgattcttttcggaacaaattccaggtgtatctaaaaaa

SEQ ID NO: 5408 - DNA, 200 bp, Lawsonia intracellularis
ataacttgcatatcatcttgtgtaagaattccacctatcttatttctagttgtttgaggctttgaggttacaatagcaaccttttgacctacaaaggtatttgttaaggtggacttccctgcatttggtggacctataagtgctacccaaccacaacgatatgtttttaatttatctccaatattactggatgactgtgt

SEQ ID NO: 5409 - DNA, 200 bp, Lawsonia intracellularis
attcatattagttacttcatcactcctataattactctaaatacgttaataatattgagtaagtaatgttaacgtgacatagttattccatatatctatatatagttaattattttattctattcattccacttgggacgacataaacgttaaacaagctaacaactattaatcaccttaaaagttaagatgatccttca

SEQ ID NO: 5410 - DNA, 200 bp, Lawsonia intracellularis
attctaaaacatgattacatatataagacaagttaattatgattttggaccatagctcgtaatcgtatgactctatcatgaatatcggggtgggtactaaataaagtagccatattcccactaaacaatggtgcaacaataaataattctgaagttgatggattaccttgttgcattggaatctgttggttccaattaaa

SEQ ID NO: 5411 - DNA, 200 bp, Lawsonia intracellularis
aagtttttccaaagcccctgcaagaacaagaggtttacctgtaagctttgcacctgttgcatctgctaagtactctcgtgaacgagaaatagcaaattgaatgattgttgcagcaattggtgcaagtaatgccatagctaatactacaagaggatttgagttttcaccatcttcattgtgttgtccaaaaccaaaaatag

SEQ ID NO: 5412 - DNA, 200 bp, Lawsonia intracellularis
ctgtaaactgtaataaattggcaatagaaactatcgccgaacctataacacttgctactgtttgaataaggatatctcggtttgcaatatgtgcaacttcgtgtgctaaaacgcctttcaattcttctggagataaaatacgtataatcccttccgtaacagctacaacactatgttctggatctctacctgtagcaaaa

SEQ ID NO: 5413 - DNA, 200 bp, Lawsonia intracellularis
gcatttggtgcatcttcaggaataaccacaatccgtggcttaggtatacctgcactttgtgcaagctcttctatcatagtatgaatcataggtgcttcatcaaatgataaaggttctgcattatacatacgtataacaaagctatcagaataccaataactccaaatattcataagtaaagctaaaccaaaggcaataat

SEQ ID NO: 5414 - DNA, 200 bp, Lawsonia intracellularis
aaggcctgtcctcccacctaacaccccaccaataacaataagtaagccagaaaggactgcaagtagaataaaagtttttatttgacttgtcacaactctaatactccttaacaacaattttgtattgcaatccatataatccaaattatcttactatagtaagaacaggaatacattttgacaagaattaataagctaaa

SEQ ID NO: 5415 - DNA, 200 bp, Lawsonia intracellularis
cttgattctttaagcatattagttaccattcaatcctagcctaaaagctttattaattatactatacaaagtaattagttatattgctatgcattaatttaccatatgttataggataactttgacaatgacttatccacctataatgattattgccttactaaggagctagttatgtatattggacttgatatgggtgg

SEQ ID NO: 5416 - DNA, 200 bp, Lawsonia intracellularis
aactcatactgatgcagttatcattaataataaaaccgttgttgctgaagcaaaagtacctacaaatcataaaaatttttcatcctcaatagaacaagctctaacacaacttttttttacatcaaaaatttcttcctcactagttacacgtataacctttggaagtactcttgctatcaatgctattgttcagaacaaac

SEQ ID NO: 5417 - DNA, 200 bp, Lawsonia intracellularis
aatcaccagtaggacttctcttaggttctggcccagggattaatcctaattggtttactattggcgagcatagctttcttacatctgctaagcttgatcatagaggtatagagattaatcctttacaaagaggtccactacaaacatgtatcaatgaatggaaaaaaaatggtattaatacatttgcgtgtgtatctaaa

SEQ ID NO: 5418 - DNA, 200 bp, Lawsonia intracellularis
ttttctattcgtaaccctaaacatgaaaatgacatggaattagttatacaaaaaatatttgaacactatacaacaccagttatctcaaaaggccatatgctatcaggcagtttaaatttcccacgtcgtattacaacagcatactggaatgctgctgtatggaatatccataataaatttataacttcgattgaacttgt

SEQ ID NO: 5419 - DNA, 200 bp, Lawsonia intracellularis
acttaaaaaattttctattaatgctccaacttttttactgaaagcagatggtggatccattcctttagcactatcacgttctatccctatagaggctattcactctggcccttctgcaagcatcatgggactcatcgcattatatcctacttctgaaacatgtctccttttagatataggtggaacaacaacagatattt

SEQ ID NO: 5420 - DNA, 200 bp, Lawsonia intracellularis
ctatcatagtaaaaggtaaaccaatattatcaacatcagggctaattatccaaaaaaaacctacattgataagagcattagcatcttactctatacctcttggaggagattctttagtaaatattcaactaatggatggaatcccccatataaaagtaggaccactacgtgaaggacctgcaatggcttttgatggggaa

SEQ ID NO: 5421 - DNA, 200 bp, Lawsonia intracellularis
caccccacatttcttgattgtcttaatatcttaggctatgcacaagtagggaatattactaaatcttatgatggtatttccttactttctaaaaaatataatataattccacaagatattgcacaatctgttgtatactcagcacaacaacaactacaagaaggaattagccatcttctcaatgaaataaacagtaagcc

SEQ ID NO: 5422 - DNA, 200 bp, Lawsonia intracellularis
tatacatacaattgaagcacttcttgaaaaccataatgtacaaccaacactatgcatagttacaggaggacctgctagtagtattaaaccattattaaatactatactaaatctacctataataacaccaactaagtatactttagtcacaaatgctattggagcagcactgacaaaaccaacagctgtattagaacttt

SEQ ID NO: 5423 - DNA, 200 bp, Lawsonia intracellularis
atgcaaatacagaaagacaagtttgtttagtaccatccctcaacacccaatatcctattcctaattcttactcactcaaagaagcttgtcatgacgcatctaacattctgaaaaaataccttcaagatattacaaatacaacaacttccccaataatagatattattgaagcacaagaattttcaacactagatatggtt

SEQ ID NO: 5424 - DNA, 200 bp, Lawsonia intracellularis
ggtaaaaaaggaaaagatatcagagtagtctgccaagtaagacctgaacttgaattctctttgaattaacaataactgttattcatagtagattgagttatgttataaacgtttctattcagaatctgtattaaagtttggcaaattttttgtgggtcaaaataaggagcataagttttagttatcaactctgtagaaat

SEQ ID NO: 5425 - DNA, 200 bp, Lawsonia intracellularis
caattctataccatttcttataagccatttataaggaatacctcctggatagttatttgtatttctatctacaagtattatatctggataaatattctgttttgcttcaccgcttcttaagatatatcctagatattgtatttgttcttttaaagaaagaccaaataactctggatcattattaagattaggaataaaaa

SEQ ID NO: 5426 - DNA, 200 bp, Lawsonia intracellularis
cttttggacaacaggtattacatattgcttcagcaatccccacaggcagtaagtttgcaaccacagaagaaaaaaaacttcccataggaaaacaaatcaagtcagcagaatgaatatattcacaaataaacgtatctgccttaagaacagctaattctactttgtccagtgattttgaaaaccatattttacgtattggt

SEQ ID NO: 5427 - DNA, 200 bp, Lawsonia intracellularis
gaagaaacttggctatctttctttcctgtaaaacgatgttgacctatataaatttcaccgttttctaactgtacacataaatgtatattagcatctataagaggtctaacaacacctttactccctaaccagtgagaaaaaaatgtcactgctgcaaaaagatctctgttttcttgtaaataccttgatgtcaaaagaat

SEQ ID NO: 5428 - DNA, 200 bp, Lawsonia intracellularis
gttacctatacttgctccagataaatcaaaaccttctggtaattgtgtaagaaaaaaacgaatttcttcctttacaaattgtaaagtgacatttgaaaaatgatacatcattggatggttaccatccctcagttgacacatttcatctaataatgcctttgatgatgcttgttttggtaacctgtattcaaataaaaaaa

SEQ ID NO: 5429 - DNA, 200 bp, Lawsonia intracellularis
tcttttctttatattctggagaagttctatctgctagagatatcaatcttgaacgtaaatcccccacagcaggcatagaaaaagcttgacgtaatactgcagaactcccaccagaatcaaatggtgtaataagatatgtagcattctttgtgtactgtgtaagacacgatgctacttctctaagagctgtcccaccacta

SEQ ID NO: 5430 - DNA, 200 bp, Lawsonia intracellularis
aaaaatacaatcttaggatcaacaactaatccctgctgtatacttaaaccataagtaagtgtttgatatttcattaacggtgacaacttagtcattgatataccctcttccaaactacctataatataacttagctataatatctaatagtttctctctacattaacttaatagatctctaaataacctttgaaaatact

SEQ ID NO: 5431 - DNA, 200 bp, Lawsonia intracellularis
atatgtaacatatacctaactgtaatttactactctatctatattgaccatgaaaatagctagttacatctgcatgcaattatatatcaagttataaaaacttcaatttatctaattttgtattaaatttaattgtgatagataagtcctattacaactagcgagctctctatttttaacatctagctatattataattg

SEQ ID NO: 5432 - DNA, 200 bp, Lawsonia intracellularis
ttaataacaaacttattgaaaagttaaattattcaattttaacaaatctaatatttgttgtactacttactactaaagttattcttcatcataagaatagcgtatataaaagtacactaacaatacattaatataatattattgctagctaacctaattagttatctactaaggcctaattatcactactccttatcctt

SEQ ID NO: 5433 - DNA, 200 bp, Lawsonia intracellularis
gataataaaaactaatacatctctgtgtttttattctttctttatagatttcatatagacaaataaatcttgatgtcttgtcagattagattatgtaagctattttttatatactacattagtaagtaacaaaaaatctggctctatctaaatatatcttacttagagatcaaactagattaaatgactttattcttttt

SEQ ID NO: 5434 - DNA, 200 bp, Lawsonia intracellularis
aatcaaaaaactatatatgataataggacaaaacaatttgtctgctggagatattcatgactgatgtaacactccctaaagcgtatgagcctaaagacatagaaacatattggcgtgaccattgggaacgtaacaatacctttactcctaacctgaatgaaaaaggggagccattttgtatagtcattcctcccccaaat

SEQ ID NO: 5435 - DNA, 200 bp, Lawsonia intracellularis
gtgactggaattttacatataggtcatgcattaaacattacgcttcaagatattctttgtcgtcatgctcgacaacaaggtaaaaaagttctctggataccaggaactgatcatgcaggcatagcaacacaacatgttgtagaacgtatgcttgctaaagaaaatgtatctcgtgaacaacttggtagggaagcgtttat

SEQ ID NO: 5436 - DNA, 200 bp, Lawsonia intracellularis
ccaaaaagtttggcagtggcgtgaaaagtatggtacacatatccttgaacaacttcgtagaattggggcatctgttgattggacacgtgaaagatttaccatggatgacggcctctctcaagctgttcgaaaagtatttgttgagctttataaacaagggtatatctataaaggaaaatatattgttaactggtgtacgt

SEQ ID NO: 5437 - DNA, 200 bp, Lawsonia intracellularis
attgtcatacagccctctctgatgatgaggtcgaacatcgtacagagaaagggaatctttactatgtccgttataaacttgaagatggttctgacgatctaataatagcaacaacacgtccagaaaccattgtagccgacacagggatctgtataaaccctaaagacaaacgatatactaatttcatcgggaaaaaagct

SEQ ID NO: 5438 - DNA, 200 bp, Lawsonia intracellularis
gttgttcctattataaatagaattgttccaatcattaccgatagctatgtagatcaaaattttggaactggagttttaaaagttacaccttgccatgatgttaatgattggatgcttggtcatcgacataaccttgcttttatccaagccattaatgataaaggtatcatgactgatgaggcaggaccttatactggact

SEQ ID NO: 5439 - DNA, 200 bp, Lawsonia intracellularis
ctctaaagaagcatgtcgtaagcaaattgtagaagaccttcaaaaacacaatcaccttatcaagattgaagatattgagcatacagtaggatactgttatcgatctcatacagtaatagaaccgtatgtttctgaacagtggtttgttgctgcaaccaaaatggctcctcaggcacgtgctgctgttccagaacaaacaa

SEQ ID NO: 5440 - DNA, 200 bp, Lawsonia intracellularis
aactttttcctaaaagctggttaaaaacttattacaactggctagataacatccgagattggtgtataagcagacaaatatggtgggggcaccgtatccctgcatggacttgtacttcttgtaataaactttttgtagaagaaactgaaccatcatcatgtccatgtggctctcataatcttatccaagaaacagatgta

SEQ ID NO: 5441 - DNA, 200 bp, Lawsonia intracellularis
cttgatacatggttttcctctgcaatctggccatttagtactcttggttggccaaataaaactccagaactggctatgttttacccaacctcaatccttgtaactggctttgacatattatttttctgggttgccagaatgatgatgtttggccttcattttatgaaagatgtaccattccgtcatgtatatattcatgc

SEQ ID NO: 5442 - DNA, 200 bp, Lawsonia intracellularis
tcttatccgtgattcagaaggacgtaagatgtctaaatcattaggtaatagcatagatccaatccaaatgatagaaaaatatggaacagatgctttacgatttacccttactgcatttgcagctatgggaagggatattcgcctttcagaagaacgaattgaaggctatagacatttcatgaataagctctggaatgctt

SEQ ID NO: 5443 - DNA, 200 bp, Lawsonia intracellularis
ctcgctttgcattgatgaatcttcccacagattctgttcaattagtatcaatagaagagattacagctctccatcataaatggtttttacaccgccttgaagaagtaaaaatagatgtaaacgactctataaaaaattatcgctttaatgatatggcccaaacactttacaaattcttttggaatgaattctgtgattgg

SEQ ID NO: 5444 - DNA, 200 bp, Lawsonia intracellularis
tatctagaaatcataaaaatagatttcaaagaagaaggattacacaaaactcaagcacaatatgttctttggcttggattaaaagaactacttattctcctacatcctattattccctttatcacaagtgaaatttggaaggcgcttcctggtcatacacaagaacttgcttgtgaaccctttccttcaactcgttctca

SEQ ID NO: 5445 - DNA, 200 bp, Lawsonia intracellularis
ctgtctttctcctaacgaagctaaccagatgatctttttacaagaggtaataagtgctattcggactatcagagctgaactaaatatttcaccatcttataaactctctgtactattacgtcctatcgactctatccaattatctcttctacaaaaaaattctaaccttattataacacttgctaaattagaaactctta

SEQ ID NO: 5446 - DNA, 200 bp, Lawsonia intracellularis
ctattgattctaaccaaaaagctcctggtccttcagcaaaccatatcatccaacattgtgaaatcatagtttttctatctggtgctattgactttaatgcagaatacaaacgactaactaaagaattaaataaaattgatactgagcttcaaaaaataacagaaaggttaaaaaataaaaattttatacaaaatgctcct

SEQ ID NO: 5447 - DNA, 200 bp, Lawsonia intracellularis
aaagaaattgttcaaaaagaacaggctagaaaagatgaacttttatcttctcatcaaaaaatatatgtattaatgaaccaatatcttaataatattgataaataactacattaatagtatgtataaataattttattacttttataataaaaaaataaaaatgagtataaataatacaaaataaatatataaatagtata

SEQ ID NO: 5448 - DNA, 200 bp, Lawsonia intracellularis
ataataaaaatttatgtatatacattagtataattaattataaatttatattataaaaattttaagttttactaaataactaaaaaaatttttatgtataaaaatatgttatatattattatattttttatgtattaaatctaaattataaaatatatagtactaactacttaaaactgtataattaccataaagatagt

SEQ ID NO: 5449 - DNA, 200 bp, Lawsonia intracellularis
aatactacttttatattttttctttttttttttgaaaaatatttaaaaaaatgcttgaataacaacttgttatagactaatcttatatctagttagttgagaatattatattgaatatatctcttttaaaaatggaaaaaaattttaaagagatataataataaaattaagtaaaatttctaatagtcataattatagaa

SEQ ID NO: 5450 - DNA, 200 bp, Lawsonia intracellularis
atacaaaaaaattacattagagttattttttagtaaaaatatgactgtggaagatagaataataaatttctacaaaataataaattcctacaaatatttttaattcaataactataataaatatatagtcatatattgttttactactaataaaatattgagaatgacaaaagaagtaatgtagtatttatagctaggtt

SEQ ID NO: 5451 - DNA, 200 bp, Lawsonia intracellularis
tgtatacaaatttaaccttactactaattattactattaataacttttaagtttagctttatactaggaccttttatacatattctttgaaagaatttagttataaaagtaaattataggaagtcatcaatgtaataaattttaaattttttaattatgtaatttaagttagttttggcattagttaaatttagatgtag

SEQ ID NO: 5452 - DNA, 200 bp, Lawsonia intracellularis
taatttattaattttaatattttttacaggaagaggttatggcatacctatctatttcaaaaaatcaatgtaagtcttttttaataactctagtaactatatttataatgacatcaataccacaactagctgaggctgttgaacactttgctaatggtgtccccacagtagtacaagatgttaatgtcccagctgactca

SEQ ID NO: 5453 - DNA, 200 bp, Lawsonia intracellularis
tactttggtggtgctgactcagctgtaggtccaaacccaatagcttctactcaccttacaatttctacaactcaagggtttggacaaaatgcactagaatttgttgtgggtggtagccttgcaaatggtaatggaaatccagccaacataaatggagatatagtccttattgttgaaaatacaaatactcagaatagtat

SEQ ID NO: 5454 - DNA, 200 bp, Lawsonia intracellularis
tattggtggtagtatggcaaatgctgcccctgtaactattggtggctctatttttatgactcttagaaatgttactgcagtagatccaatttttggtggctctgtagatgtacgctttttcgcccaacagcaacctaatgaggatcaacttgtaggtggagatattaatataaatctagagaatgtaacaactccagagt

SEQ ID NO: 5455 - DNA, 200 bp, Lawsonia intracellularis
tttatggtctaggctacgcaaatggtgtaatacctgttaacgtcctcaatagaaattttttggtagctgttcagggaaatataactacaaatatttctaattctaacattgcaaccgttatgttaggttcacactatgatacaactatggctgtaggaggtaatggaacaataaatgttgataattcaacaattggttat

SEQ ID NO: 5456 - DNA, 200 bp, Lawsonia intracellularis
ctttcagctagcaatagtagcgactttgttaaccctgacttaacaaacactgttacttttaatattggtcccaacaacagaatagcaaatatttttgcaagcaataatggtgttatcccacattttattgtaaatatggatggatctggaacagaaatacaagagttaacacttggtaatgtaattcgaggtggccttgt

SEQ ID NO: 5457 - DNA, 200 bp, Lawsonia intracellularis
acttacttcagagctaaatctatctcaaggaacaataaataatttaatcactggtaatgaatattacgatagatcaggattaagaactactgtaaatgttagaggaggtacaattggcgtattgacttcaggaggttctgactattcagaattaaacttcattcctggagaaatatccactatattagcaacaaattcaa

SEQ ID NO: 5458 - DNA, 200 bp, Lawsonia intracellularis
taggtaaccaagattttgcatctctttctcaagttacaatacaccaaggtgctgaaactctttggggaatgagagatgaagtatttgaacttcaaactaacaatctacagttaggtggtgaactatttattcctgctgatggaactggaggagtagccctaatcacaaatcatattattgcaaattcaggtgtgataact

SEQ ID NO: 5459 - DNA, 200 bp, Lawsonia intracellularis
ccggtaaatatgtctccagaaaggatgacccctatcattggatttttagaacctactggtgaggtagcacagttaacaatatatggaccacttacagttaaccttagccattctccagaaattcttgggaaaattattacacaacctatccctattgcagttactaatagtgatgtttttggtacttctaaactatttgt

SEQ ID NO: 5460 - DNA, 200 bp, Lawsonia intracellularis
ggaacataacacaaaaggactaatttggagtgatatcatttttaatcctcaagataaaacatggtatctaactaactttagaggttctgaagacttctacggactttcagcagcacgggaagcatctaattggttaagacaacaacatatctggagcctacaacgtcgctctaataaattattagatcatggtgtagatg

SEQ ID NO: 5461 - DNA, 200 bp, Lawsonia intracellularis
ggttatggatgaatgttcaaggtggttatgaaaagcttgatgcagcaattggtgatgctaagatgccttggattatggcaagcttaggatatgattttatgcataagttaagtgatttttataacttaaaagcactttatggattcggatttggatttgctacaggtaaaaataaatggaataccataaactcaactact

SEQ ID NO: 5462 - DNA, 200 bp, Lawsonia intracellularis
aatgatatctacatggggctggttggtgcctatgttggccttatgcatgaagccacaggcctttatggtacagtatccggacagtttgcaactaaccgtacaaaaacaaaatgtacaggctttgatgaaacctataactggaaagaaaatgtaccaacagaagctattgaaattggttggaaatggagcattgatgagtt

SEQ ID NO: 5463 - DNA, 200 bp, Lawsonia intracellularis
taaaataaacccacgtggacaagttatttttgaacaattatctaaacatcactttagtctctcacaagaaggtgatactgctatcttagataaagaattcttaactacaaccgttataggtatctctggagaatatgatttagatttaagaagtaaaataataaagcttcaagctagtgttgactggattaaaggcatct

SEQ ID NO: 5464 - DNA, 200 bp, Lawsonia intracellularis
ctggtgactttgcagctaaatccgaagttcttaatatgaagtttaaagataaaaatgatactagtacatttagaggaacactgggtgctagtgcacaacttctagaaaactttgaagttcaccttgatatttttggtgatcttggcaatgataaaggtattggtggacaggtaggagctacttatagattctaactgtaa

SEQ ID NO: 5465 - DNA, 200 bp, Lawsonia intracellularis
aaattagatatgataaagaggcttatggaattattcacaagcctcttttatatctattcaaaaaactataaatttaattttctgattccatcaccagtaatcataaaattttacaaaaaataattcatgtttcaataactaatttaaaatactacaatcttaaataactttatcacattattatctctacgttttttctc

SEQ ID NO: 5466 - DNA, 200 bp, Lawsonia intracellularis
ttactccttgaaaaaacttgcaaactaagctaatagacactattatatctaaagattagaaatagtagttacctacctaacatatatctaatctataactataggttagggagagctgatatggataatgaactattccaaaatacatttaaaaatattgtattacgattagataatggtacagagatgtcttttttagg

SEQ ID NO: 5467 - DNA, 200 bp, Lawsonia intracellularis
tagacagtttgcaggtggtgcttggtatgatgaagaaacaaatatacttacacgacaacatctttatgttacagatacaaatgaacatatttattctattgtatcaattgatggaggtaaaaaaagcactagggcttaccgtgtaaaactttgtggaaatcaatgtatacttaataatggtcgtacagaaatgatacttg

SEQ ID NO: 5468 - DNA, 200 bp, Lawsonia intracellularis
aatttgaaatgcttatggttgcagtaagagctttaacaggaattgataaagaagatacaccatctcttaacataattgaagaaacacttcgtgctgcaaatgcataatcgtacttattaactcctatagatatttatccttccataagaatattacataaatgaatactataccataaaagttctattatctataataat

SEQ ID NO: 5469 - DNA, 200 bp, Lawsonia intracellularis
attattaccccttgaatccccataagttgtttatattttattttttatcattaaaaggagctaggttgtgaatacacattatactcttattcgtgaagttaaaattcctgaagtttcaggtattgctaaatattggcgacataatggtaccaatgctgaaatcctttctatctctaacaatgatgagaataaatgttttg

SEQ ID NO: 5470 - DNA, 200 bp, Lawsonia intracellularis
gtgttacatttagaacacctcctcatgattcaacaggagtagctcatattcttgaacattctgtattatgtggttcaaaaaaatatcctataaaagaaccatttgtagaactacttaaaggttcattacaaacttttcttaacgcattcacattccctgataaaacttgttatcctattgcaagtgcaaatttgcaagac

SEQ ID NO: 5471 - DNA, 200 bp, Lawsonia intracellularis
ttttataacctcatagatgtatatttagatgctgtttttttccccctgattactaaatcaatttttcaacaagaaggatggcatatagagatagaagatacaaaaaaacctcttacatacaaaggtgttgtatttaacgagatgaaaggtgtatattcttcacctgatgctatacttatggaaaaatcacaacaatctct

SEQ ID NO: 5472 - DNA, 200 bp, Lawsonia intracellularis
tttccccaatatgctctatagccttgactcagggggagatcccaaaattatacctcaacttacatatgaaaaatttatagagtttcatagctctcactatcatccatcaaatgcacggttctttttctggggagacgaccctgaagaagagcggcttatgcgattactacctattctgtcacaattcacagaaaaaaaaa

SEQ ID NO: 5473 - DNA, 200 bp, Lawsonia intracellularis
tagacagcactatccctctacaatcctacttacaaaaagaaaacgtattaaaagtcccttatgctactggcgaacaatctgagaaaggacatattacttttaattggcttttatgtcctacaacagaagctgatgaaattttactacttgagatacttgaacatatcctcctaggattaccaggttctccattacgtaaa

SEQ ID NO: 5474 - DNA, 200 bp, Lawsonia intracellularis
gtgcttattgaatctggtcttggagaagatgttacaggtgttggatttgaaaaagatcttcaacaaacctatttttctgttggattacgctccattaacccagaatcatctcataaaatagaaaaattgattctccaaacactagaagatctctctaacaatattcctacgcctattattgatgctgctattaatagcat

SEQ ID NO: 5475 - DNA, 200 bp, Lawsonia intracellularis
agaatttagcttaagagaaaataattctgggaaattcccacgtggtttaactgctatgttgcgaagtcttaggacatggctctatgacgctgatcccttaattccattacggtgggaaaaaccattatcagatattaaacaacgtcatgcaaatggagaaaaaatttttgagaaagctatccgaaaatggtttatagaaa

SEQ ID NO: 5476 - DNA, 200 bp, Lawsonia intracellularis
ataaacataaatcaatagttactctaatcccagattcaaaacttgcagagcaacgtgaaaatgatgaacaaaaacagttaaaacaaattaaggatagtctatctgaacttgaagtaaaccaactcataaaagatactattactctccaagaaaaccaacaatgtccggatacacctgaagcacttgcaactatcccatcc

SEQ ID NO: 5477 - DNA, 200 bp, Lawsonia intracellularis
cttacattaaaagatttaccacctaaaaatgctgtcattccctgcatagttgagaatgacaaacaaattactattttaaaacatccaattgatacctcagggattgtttatgttgaatgtctcttctctttagatgctgttcctgatgacttactctatcttgttcctctttttggtcgctgtttaacggagttaggtac

SEQ ID NO: 5478 - DNA, 200 bp, Lawsonia intracellularis
acacaaacattcttttgtagaacttggagtactattagcctcaaaaacaggtggaattgatatctctccacttattactacaactaggggaactcaactacctgtagctaaactatgtataagtggaaaagctacagaagatcatattacagatcttttttctatacttgaagaaatacttttagaaacacaatttgatc

SEQ ID NO: 5479 - DNA, 200 bp, Lawsonia intracellularis
tcaaagatcgctttctacaaatggcattagaagaacgcgcaagaatcgaacaggccctcatccctgctggacataatgttgttataacaagactacgctcaccctatagtattgctggacaaataagtgaaaacattggtggtgtctcgtatttagaagcattacgtaatcttacagaacgcattcattctgattggcat

SEQ ID NO: 5480 - DNA, 200 bp, Lawsonia intracellularis
tcaatacatacagatctcaccaagttacaacaaattattattaataagcagcataccatctttaacattactgctagtgaaactcttttattaaaaacattaccacttattaatcaaattgaatataagcttccatatgtagaaaacaatcctatactacgcactaccaagaaacctcttataggagaaattcttcaagt

SEQ ID NO: 5481 - DNA, 200 bp, Lawsonia intracellularis
accatcacaagtcaattatgttggaaaaggttgtaatatctatgagttagggtataaatggaatggttctgcacatgttattacacgccatttacgaatggcttggctttgggatcaagtccgtgtccaaggcggagcctatggtgtcttctgtacattggatcgaatgaatggttctctcacacaagtatcatatagag

SEQ ID NO: 5482 - DNA, 200 bp, Lawsonia intracellularis
atcctaatgtagaaagaacaattaaagcatttgatcagtccgccaattatcttaaaaatcttcagttaacagatagagaattaacacgagctattgttggtgcaattggagacttagatagttatatgcttcctgatgctaagggtatggcttcacttacaaggtatcttactgatgatcaagatgagatacgtcaacat

SEQ ID NO: 5483 - DNA, 200 bp, Lawsonia intracellularis
atgcgtgaagaaattctaagtacaacaaaaaaacaatttacagagtttgctgaagtaatggcagaagtagcaaaaactggctctgtatgtatccttggtggctctgcagccactgatattgcacaacaaaataattgggttattcatcaattattataaaaaataggtataactttggttaaaaagttaaaaattttatg

SEQ ID NO: 5484 - DNA, 200 bp, Lawsonia intracellularis
taaaaggaagaggtatagtaaaaaaagtattaatttacactgtaattccatataaaaggaggacaagatgtctaagcgtgtgattatcattggtgctattgctgctgggcccaaagctgctagtcgcttgagacgtcttgaacctacaacagaaatacttatggtagataaaaatgaatatatttcatttggtgcttgtg

SEQ ID NO: 5485 - DNA, 200 bp, Lawsonia intracellularis
gaattccatactatatctctggagaaataaattctatagattcactacgttctactgcctatggtgtattaagaacacctgaatacttccaacaaaaagggattacgacatacaataggacacaagcaatatccattgatcgaaaacaacaaattgtacttttaaagcatcttcttacaaataaagaatacacagtttcg

SEQ ID NO: 5486 - DNA, 200 bp, Lawsonia intracellularis
tatgataagttagttcttacaacaggaagcaaacctaagcttccaaccattaaaggacaacatctaaaacatattgtaactattagtaatactagccttgactctgctcaacatatccaaacattatgtgcatcaaaaaaaattaaacatgctgttatcattggtggtggttttattggattagaaatggcagtttccct

SEQ ID NO: 5487 - DNA, 200 bp, Lawsonia intracellularis
tgcaggaaaatggaaaataaagacctctattattgaggttaagccacaagttatgccaggctatgtctcacctgactttgctgatatgctttgtcatgatcttacaaaaaataatgtagaaatttttacctctgagcaagtattacaattcaaaggtaaaaatgattccgttaattatcttattacagataaaagaaaaa

SEQ ID NO: 5488 - DNA, 200 bp, Lawsonia intracellularis
ttgaaactgatcttgttatctttgcaacaggttttttacctgaaacaacactagcccaagaagcaggacttgcccttgatcctaagacaggagctatacttgttaacccatacatgcaaacctcagatccaaatatttatgcaggaggcgactgtgtagctgtacctaatcctattactggagaacatagttggttcact

SEQ ID NO: 5489 - DNA, 200 bp, Lawsonia intracellularis
cttggctctttagctaatcgacaaggccgtattattggaactaaccttgctggaggtagtgatacatttccaggtgcagtagggaactggtgtatcaaactttttactttatctgcttgtggtgctggactcacacttgaaaaagcaaaatccctaggatttgatgccatctcagctagtattgagcaagcagatagatc

SEQ ID NO: 5490 - DNA, 200 bp, Lawsonia intracellularis
acaatcataccctgaacatagtataatctctttagagcttatcgtagattgttcaaaccgtagagttcttggcattcaaggtatatgtagtgcttcagatgttgttaaagcacgcattgatgctataactatgctattacaatatggtcatcctacaatagatgatatttctaatgctgaaatgtcctatgctccaccat

SEQ ID NO: 5491 - DNA, 200 bp, Lawsonia intracellularis
tttcttcagctatggatcctattaatgttgttgcaaatgtagcagataatatactttctggtcagctagaatctgttacctcaaaaacattcacaaccatgtggaatgatagaaaaaataatactatcttctttgtagacacaagacctacaactgcctcaaaagaacttaaagaaaaatatcctaatgaatggcatact

SEQ ID NO: 5492 - DNA, 200 bp, Lawsonia intracellularis
attccttttgaagaaatttcatcatatctttcagaacttcctaaaactcagccaattgcattaatttgtaatactggcctaagagcatatgaaacaatgtcatacttgcgagggaaaggcataacaaacacaatagatgttcttggtgggatgtatgcaattaaaaagcgaggagaagaattatagtctcacctcttacc

SEQ ID NO: 5493 - DNA, 200 bp, Lawsonia intracellularis
tactcatcatactaataatttcaatcttatgtaaatatggccattaattctggagctgctcttctatctttcccattacaacttataaaacgctgtacgctaaaacaatctatctttgccatagaatacagttctcttgtcactggtgtatcatgattacttaatacaacagggatgccttgctccgaagctttataagc

SEQ ID NO: 5494 - DNA, 200 bp, Lawsonia intracellularis
aagattagccaaatctttttgatcatcataactgaaaactgttccagagtatgtagtaaaatttgatgtatttgaaagtggtaaatatggaggatcgcaataaacaacatctccaggataaagatttttaaaagcatccctaaaatcacatacagcaaaagtaatagatgtttctttcatcttctttaaaaaagcttcca

SEQ ID NO: 5495 - DNA, 200 bp, Lawsonia intracellularis
tttcttttttaggaaaataagggttattatatctcccaaatggtacattaaataatcccatggagttataacgaactaacccattgaaagaatgtctattaaggtataaaaataaaactgctctttcaaatggatgtatagaatgattaaaaatagttcttaatgtataataagtgttagcattattataccgagtagta

SEQ ID NO: 5496 - DNA, 200 bp, Lawsonia intracellularis
aaaaaagtttgacatatttttataaaaaattcgccttcttgttgtaatacttgaaatagccctattaagtcaggactgctatcatatatacaaaattctttaaatgaagcatttaaaaatacagcacctgaaccaacaaaaggttctataagacgctctccttgaggaagatgatataatatacgatcaagtaatctaaa

SEQ ID NO: 5497 - DNA, 200 bp, Lawsonia intracellularis
tttccctcctggccatttgagaaaaggcttcactaactgcatacaaattttcttataaaaaattaatataaaaacagagagagacttatagtttccccagaggagttggaccaggttttcctccggatttttcaaaacgtattatagcttctggcataattttttctaatgccaaaattcgattctcattcactggatgc

SEQ ID NO: 5498 - DNA, 200 bp, Lawsonia intracellularis
gtacttaaaaattcgggtatagactttttatctaataaagaaaaatttttccataactgaatagactcttgtgggtcatagccagcatctgccattaaaagaattcctacatgatctgcttcatattcatgctcacgactatatggtaataaaattccaacagttgatgctgtaccatacacttgtctaaatatctctgc

SEQ ID NO: 5499 - DNA, 200 bp, Lawsonia intracellularis
ataagatgattttccatatttatcaatagttgctgcaccaacctctccaccaatttgcaaaaggagagcctgactcatacgttctgaaccatgcctcaaaataacatgagtaatttcatgtcccatgatagcagctagttgttcttctgttttggcaacttgtaaaatccctctataaacaaaaactgaaccaccaggca

SEQ ID NO: 5500 - DNA, 200 bp, Lawsonia intracellularis
cagcaaaagcattaacagtatcatcatcaatagtataaaaacgccattcatactctgatttaggcaaaactgcagcaatccgcttacctatttcattaactttctttgaaaattttgaatctttttctattttttctttctctaaaagagaagatgttaattctgaacctaaaatctcttcgacacaagtgggtataagg

SEQ ID NO: 5501 - DNA, 200 bp, Lawsonia intracellularis
agaagctggcttctttctgtatatggagttattgcacatcctgttattaaaatagctgttataaaaaaaagaccttgtagtattatagaatgaatcatactctttcccatatggtatggttaaagattattagcttgaccttattaaaaactaacataatgctatttgtggatatagtaaactttttattagactttttt

SEQ ID NO: 5502 - DNA, 200 bp, Lawsonia intracellularis
gaggaacgtttttatgggcaaaaatctcattattgttgagtctcctgctaaagtcaaaactatcaaaaaatttcttggttctggctatgtagttcaatcaagcgttggacatatccgtgacctacctaaaaaaaatattggtgtcgatgaaagtaaaaacttttctcctcactatgaaataatccctggaaaagaaaaaa

SEQ ID NO: 5503 - DNA, 200 bp, Lawsonia intracellularis
ttgtccaaggacttcgtgaaacagcagcaaaagtagatactgtttatcttgcaccagatccagatcgtgaaggtgaagccattgcttggcatgttgcagaacttataaaagataaaaatagtaatatacaacgaattcaatttaatgaaattacatctaaagctgttcaagaagcattaagtcatccacaaaaacttaat

SEQ ID NO: 5504 - DNA, 200 bp, Lawsonia intracellularis
aaaaatctttttgacgctcaacaagcaagacgtattcttgatcgcctagtaggatataagatatctccattattgtggaaaaaagtaaaacaaggcatatctgctgggagagtacagtcagtagcactaaggcttattgtagaacgggatgaagaacgttatacttttattcctgaagagtactggttattcaaagcaaa

SEQ ID NO: 5505 - DNA, 200 bp, Lawsonia intracellularis
tcttgaaggttctaaccctcccccttttaaagtagaactttggaaagttaataacaaaaaacctattattcctgatgcagtaactgctgctgcacttgaacaacaaataaaggataaaccatttattgttgactcaatagaagaaaaagaacgtcaacgttcaccaaaacctccttttataacttctacacttcagcaag

SEQ ID NO: 5506 - DNA, 200 bp, Lawsonia intracellularis
cagctaatcaacgtttaggttatacagcaaaaagaactatgaatattgctcaacgtctctacgaaggattagagttaggggataaaggaacaaccgctcttattacttatatgcgtacggactctgttcgaattgctaatgaagctaaacttgctgcagcaacactcatagaacaaaaatttgggaaggaatatttagct

SEQ ID NO: 5507 - DNA, 200 bp, Lawsonia intracellularis
aaaggtggtaatggtagaaacttcaaaggaaaagctggaattcaagatgcccatgaagctattagaccaattgatgttacaatccttcctgaagatgtgaaaccttatcttgcaccagatcaatatcaaatttatcgtcttatctggtcacgatttattgcatcacaaatgtctgtagctcaattccatgatacaataat

SEQ ID NO: 5508 - DNA, 200 bp, Lawsonia intracellularis
tactataaattgtgaaaactctcagtggagaacaaaaggagaacgtcttctatttcctggatttttagctgcgtttcccaacacaaaagaggaagaagatactaacttacccgtgctacataaaggagaaatactaaagctacattcccttataaaggaacaaaaattcacccaaccaccaccacagtttaccgaagcat

SEQ ID NO: 5509 - DNA, 200 bp, Lawsonia intracellularis
ccttagtccgagagttagaagaacttggcataggtcgcccatcaacatatgcatctattatttccaccttgcaagatcgagattatgtacgtcttgaagataaacactttatagctacagatttaggccgtgttgtttgtatgttattacaggactatttcaaaaatcttatggatgtaacatttactgcccatatggaa

SEQ ID NO: 5510 - DNA, 200 bp, Lawsonia intracellularis
gaactccttgataaagtagctgaggggaaacaagattgggtggaactactccaaaatttcagtgaaacttttaatcccacattagaagaagccacaaaagctatgagtcaggtcaaaactggtttagaaactgatattaattgtcctgattgcaaaaaacctcttgtcataaaatttggtaagtctggacagttcttagc

SEQ ID NO: 5511 - DNA, 200 bp, Lawsonia intracellularis
atgttctgggtatccacaatgtaaatttacctctaactatctacgagatgataaaggacaaattcatcttcaagaaaaggtccaacctgaactgcaaaaaataggtatttgcccaaaatgtaataaagatcttgtactaaaaaaagcacgtacaggaagtcgttttattgcctgttcaggatatcctgaatgtaattata

SEQ ID NO: 5512 - DNA, 200 bp, Lawsonia intracellularis
ctgaagctttttctactaatgtgccttgtccttgtgaaggctgtaaaggaatgttagtagaaaaaagttctaaaaaaggtaaagtattctatgcctgtaatacatatccaacatgtgattatgctatatggaattggcctatacaaaaatcatgtccaacttgcagttttcctattttagtcgaaaaaattacaaaagct

SEQ ID NO: 5513 - DNA, 200 bp, Lawsonia intracellularis
aaaggaaaacatcttgcttgcccagaaaaaaactgtcgctatacttgtgaactagaagaaagcgatatagaaacctaatgaaacctacactgctattaagtgaatattattctatatggtatttcttattattacttcatcttaaaaatacctaaattcaactgatggagtcaccttatgtctatttttactattccatt

SEQ ID NO: 5514 - DNA, 200 bp, Lawsonia intracellularis
agggatgttagaaacaaattgttatattatacaaaaaggtaaaaatgcacttgttattgatccaggtggaacttctcctgaggatctctctataataactacatttattacacaaaataagttatctatccaggctatattgtgtacacaccttcactatgaccatatttttagtacagcaatgcttcataaacaaacaa

SEQ ID NO: 5515 - DNA, 200 bp, Lawsonia intracellularis
atgtaccagtatttgcatccacaaaagatgatttcttattaaaaactcaggcaaaaggaggaataggaaaactagcttgtccaaaaatagaaatttttcaacatgaagatttgacagaaggtctacacacatttaatacattttcatgtgaggttattaatacaccaggtcacaccccaggaggagtatgtctctatttt

SEQ ID NO: 5516 - DNA, 200 bp, Lawsonia intracellularis
aaagaaatgaatactctttttactggtgatacattgttctaccacactgttggaaggactgatctccctggtagcaatacaaatgatttatttacatctttacataaaaaaatctttgtacttcctaaatatacaattgtataccctggacatggtcctaaaacttcaatagaagaagaattaacaaataatccctacat

SEQ ID NO: 5517 - DNA, 200 bp, Lawsonia intracellularis
ctaactattttattttgctaattaatatagatactacctatctacaattacaataaggaaaactgttgtgtctaatagaataaaaaaagttgttttagcctactctggaggactagatacatctgttatattaaaatggcttattgctacttataactgtgaggtcattgctgtaactgccgatcttggtcaaaatgaaa

SEQ ID NO: 5518 - DNA, 200 bp, Lawsonia intracellularis
attttcatgacattgaagaaaaagcaatagtaacaggtgctagcaaagcatatgttgtagatcttcggaatgaatttgctaaaaattttattttccccatgctaagagcaagtgctatctatgaaggacgatatctccttgggactgctattgctagacccttaattacaaaacttcttattgatattgctagagcagaa

SEQ ID NO: 5519 - DNA, 200 bp, Lawsonia intracellularis
gaagctgatgcaattgcccatggagctacaggaaaaggaaacgatcaagttcgatttgaacttgcagccgcagcacttgcaccagatattcacgttattgctccgtggcgtgaatgggatttaatatctcgaactgcattaactacttttgcagaaaagcataatatccctatatctacttctcataaacgttacagtaa

SEQ ID NO: 5520 - DNA, 200 bp, Lawsonia intracellularis
agatcaaaatatgcttcactgtagcattgaaggaagtgaattagaaaacccttgggaagaacctcacattgaatcatatacaatgacagtccctattgaacatacgcctgattctccagaatatattacaattgattttgaaaaaggagaccctattgctattaatggtcaacaaatgatccctgctgatattatgttta

SEQ ID NO: 5521 - DNA, 200 bp, Lawsonia intracellularis
cattaaatgacattgcgggaagacatggtattggacgaattgacatggtagaaagtcgctttttagggataaaatcacgtggtgtatatgagactcctggagggacaattatccatatagcacaccaagatcttgaaggtattacccttgatcacatgactcttcttactcgtaatcaacttattccttcatatgcagat

SEQ ID NO: 5522 - DNA, 200 bp, Lawsonia intracellularis
gctatatataatggattttggttctccccagagcgtgaagccatacaagcattcatggataaagcacaagaacgtgtgactggcacagttaaactaaaactttataagggtatggcttatcctataggcagaaaatcttctaatagtctttatagctcccaacttgcaacctttgaagaagacacttcatataatcacaa

SEQ ID NO: 5523 - DNA, 200 bp, Lawsonia intracellularis
tgatgcaacaggttttattaaacttaaaagcttacgtatccgtggttatcaaaaaagttaatgaaactctcataaccttattataataattataataagataattatctctattcctatcgttaagttagaattgaagggaaagacatatgcctaaaaaaaaactttggggaggcagattccatgaaaagacagctagtc

SEQ ID NO: 5524 - DNA, 200 bp, Lawsonia intracellularis
ctgtggaacaatatacccagtctatttcttatgataaaaagatgtatgctcaagatattgctggttcaaaagcgcatgcttccatgctaggccgtcaaggtattctcacctctgaagaagtactactattactcaatggcttagactctattcaaaaagaaattgaaacagatacctttccctggaagattgaactagaa

SEQ ID NO: 5525 - DNA, 200 bp, Lawsonia intracellularis
gatgtccatatgaacatcgaaagcagacttacagatcttattgggactgtgggagaaaaattacacacaggtagaagccgaaatgatcaagttgctcttgacttcagactctttgtttctgataatattagtctctggaaaagacaactccttgaactcataggaatttttgttgcaaaagcagaagaatacaaagatac

SEQ ID NO: 5526 - DNA, 200 bp, Lawsonia intracellularis
tatccttcctggttttactcatcttcaacctgctcaacctgtgagcctagcacaacacttacttgcttatgcatggatgtttaaacgtgatgttcaacgtgtatatgaatgtaatcaacgtgtaagagtttcgccactaggtgcagcagcgctttcaggtactacctacaacattgaccccttctttatagcaaacgaac

SEQ ID NO: 5527 - DNA, 200 bp, Lawsonia intracellularis
tccatatgtatggtgtatttgataatagcatggatgctgtctctgatcgtgattttgttattgaagctctcttttgtgcaagtgttattatgatgcacctttctagattctgtgaagaacttattatttggtcaaatccagcatttggttttgtccaacttcctgatgcatatgcaacaggttcatccattatgcctcag

SEQ ID NO: 5528 - DNA, 200 bp, Lawsonia intracellularis
aaaaaaaatcctgatgtagcagaaattatgagaggaaaagttggaagagtctatggtgcattatacaatatgcttactatccttaaggcattgcctctaacatataaccgtgatcttcaagaagataaagagcctttctttgatacaaatacaacaatacagtcatcactttccattatggcagatatgcttgcagcaat

SEQ ID NO: 5529 - DNA, 200 bp, Lawsonia intracellularis
tacatttaataaaaacaaaatggctagtgccctttcggatggataccttaatgcaacagaattagcagattacttagtaactaaaggactctcatttagagaagctcatcatacaactggatcaattgttgcattagctgaacaacaaaaaattccattagaagaattatctcttcaggattttcaatcaatatgtgata

SEQ ID NO: 5530 - DNA, 200 bp, Lawsonia intracellularis
aaatcgaatcagatgtttttcatgttcttgactaccatgtttctatagaacgaagaaaaagtactggaggtactggttatcattctatagaaaaacaaatagaaaaactcaaatcttggttgacacaatagatagtatcatgaaaagtatttttgacttataaaaactcaacaccctataataactaaattactttaaaa

SEQ ID NO: 5531 - DNA, 200 bp, Lawsonia intracellularis
ataacttttaactacaatttacaactatgagaacatcaaactctattcatgctgttgcattactttcaggtggacttgatagtcttcttgctacaaagcttattatggaacaagggttaaacgtacgttgtctccatatgatttcccctttctttggcaaaccaaacaaagtgcaacactgggaatcattatataatctt

SEQ ID NO: 5532 - DNA, 200 bp, Lawsonia intracellularis
acaattgaaactatagatatcagtgaaaagtatatagagatgttacagcaacgaccaaggtatggttttgggaaagtacttaatccctgtatagactgtaaaatgcttatgatgaatatagcatataatcgtatgctagaattaggtgcttcgtttattatttcaggagaagtcattggccagaggcctatgtcccaacg

SEQ ID NO: 5533 - DNA, 200 bp, Lawsonia intracellularis
aaaagaagcactaaaccttatatcaaaccgtgtaaatatacaaaatatacttttacgcccactttgtgctcaacacttatcaccaacagatccagagcactctggacttgtagatcgcacaaaattacttgctttttttggtagaggtagaaaagaacaactacagttagctaattctatgggtatacaagaaataccta

SEQ ID NO: 5534 - DNA, 200 bp, Lawsonia intracellularis
cacctgctggtggctgtaaacttgctgagaaagaaaatgccagacgctattggttagtacttactaagttaaagaacccaacagttcaagacttcaaccttgccaatgttggaaggcagtattggtataataattattggcttattattggtagaaacaaagaagataatcaaaaacttgaagttttagcttcccaaaat

SEQ ID NO: 5535 - DNA, 200 bp, Lawsonia intracellularis
gatactcttataactcttaaagacattcctggaccaactggactagcaagaaatacaaccttatgggattcaaaaatcctttatgaagctgcaagtcttgttgcatcctactcccaagtagctataaaaaaagaaatgcctatagaactacaactaacatctcaaactgaaagtatatgtctaaccgtaatcccatcacg

SEQ ID NO: 5536 - DNA, 200 bp, Lawsonia intracellularis
aacaggactattcacaaaagaatgttttcaatttgaagatgttaaacaagctataaaaaatgaatttcatccatcaatagcaactgcagtatcttaatgaaaaatcttattgtttcttatctcattaactacaacaatattcttaactcatattgaaataattacataatatcagatggataatctaacttaagttagac

SEQ ID NO: 5537 - DNA, 200 bp, Lawsonia intracellularis
cactaatttaatctttaaaagtcaataataataataataataataataaggggaaataagagataatttaagatgattctttatcttacctaataaaactatgattaactactaaaaataactaaataattatcttaaataacccttttaaaaattataacaatagataacataataacaaaccatataggataagacaa

SEQ ID NO: 5538 - DNA, 200 bp, Lawsonia intracellularis
ttaaccaaaaacttatgcactgctaagaattaatgtaattatacattcaatcaaaaattataaaaaataaactattattactttaaaaattaagtcttattagtgattgtaaatgaagtatagtatcacgccaacatgtataagttttattgggatatcagactttaaaaaagattttattgggaaattatttgctcaat

SEQ ID NO: 5539 - DNA, 200 bp, Lawsonia intracellularis
atattaattgggcctacttaaatacaaatcacattatagaagcatattatgggatggcaattaaagacattatttataataataaaaatgaatcatttcttactatagaaagtaacattatctcttccctcaatataaaacgaaccattatttttacaggaaatacttgtagttataaaatggaaactatgcagtatcta

SEQ ID NO: 5540 - DNA, 200 bp, Lawsonia intracellularis
caacacattggccctgttgtatatatctatactccatttttaaaaattcttccatatcttaaccaacttaaaagaaaagatatgttaataagtccatctatcactactaataactttgaagcatttttttatgaaagggacacactatatagttactggtcaacacacataataaatgacaatcagcctattcaaaaaat

SEQ ID NO: 5541 - DNA, 200 bp, Lawsonia intracellularis
tataaacatccttcttaacttattctataattcacaagtaaaaactaactaacttgctttagactcttcacttacaaaacctttagaaggtatttctattaattttgttccagcaatttttgaaagatatgtatctccaagagttttaatatgaccatctgtatttgaaaagtaatttaaatgtgactgttcttcttcaa

SEQ ID NO: 5542 - DNA, 200 bp, Lawsonia intracellularis
gaatattttcaaaaagctttgcactaatagaatcaccattttctctacagatattaagaagcctattgtactcatcaattgtttttgtctcaagatctgtatcataagaaaaaactattctaactttttgccccttagttaccttctcagcaagatcagatgttggttcaccatcaagttcttttatacgctctgcaaac

SEQ ID NO: 5543 - DNA, 200 bp, Lawsonia intracellularis
atttctgcatgcctcatttcgtcaattgcaattaatttaacatttgaggcaaactggccataatcagaattatcaagattataatgctgattcatatattgactaatagcatgtaactccatacttcttgcataatttaatgcatcaattacctttgaaatacgttgttctttaattgttttctttgccattccgtttac

SEQ ID NO: 5544 - DNA, 200 bp, Lawsonia intracellularis
tccatagtatatttagtataacaggctaaaaatgatacagatacaataaaaagttattttaaataatctacaaattaaattaaagattactatcatccatctattatatataacgtatttaatcacaacaatcttaaattaaatacagttatattaaaatggaggatgtttactctttctatatgtattattttgaaaaa

SEQ ID NO: 5545 - DNA, 200 bp, Lawsonia intracellularis
ataacaaacacgaatataaacgtcaacttttatgatagactacccttttcaaatatcttattataatatataatctaatttatcgtaatgaatatcaacataacctcacacaatagataaattctaacacaattgttattatatattgtaaccagctaattaatgattattataataaatatatgcatattttctagtta

SEQ ID NO: 5546 - DNA, 200 bp, Lawsonia intracellularis
accaaaataaatgcgttttaaggattttttcaatgtgtggaattattgcctatgctggccatagacctgctatccctgttattattgaaggacttcgccatctagagtatcgtgggtatgactctgctgggataggctttatccaaggggaaacgctctatcatgttaaagcaaaaggtaagcttaatgctttagaaaaa

SEQ ID NO: 5547 - DNA, 200 bp, Lawsonia intracellularis
aaactctctacctattcaccaatgctttctacagttggtattggccatacacgatgggctacacatggatctccctctgagtgtaatgcacaccctcatgtaaatgaagaatgtggtattgccattgttcataatggaattatagaaaactttcatgagttaaaacataccctttctgaaaaacagtaccagtttaaatc

SEQ ID NO: 5548 - DNA, 200 bp, Lawsonia intracellularis
agaaacagatacagaagttcttactcatcttatcgcagaaggatgtaaacaatattcttctttaatcgaaagttttgcatgggcattacgccaagcaaaagggacatatgctgttgcccttattagtgagaataatccttctatggtacttgctgcacgtatgtctgctcctcttattctcggcgtcggtactggagaat

SEQ ID NO: 5549 - DNA, 200 bp, Lawsonia intracellularis
attttattgcttcagatattccttcattcctaaattatacacgtgaagttgtattcttagaagataatgaaattatatctattacagataactcatggcaagttaatgatttatttacattaaatcctgtaaaaaaatctattcagactatctcttgggataaacattcagcacaaaagaatggttataagcatttcatg

SEQ ID NO: 5550 - DNA, 200 bp, Lawsonia intracellularis
cttaaagaaatttttgagcaaccacaagttattgaagaatgtctttctgaaagaattaatcaagaaacggatcatatctacttcccagaattagataatttacctatcccaacacgtataattgttgtagcatgtggatcttcctatcatgctggaatatggggaagaaatatattggaacgttgggcaaaaatcccaac

SEQ ID NO: 5551 - DNA, 200 bp, Lawsonia intracellularis
gctacctgaaattgcttctgaattccgatatcaagagcttattactagccctggagaactaataatagttattagtcaatctggagaaacagcagatacattagctgcacttaaacttgctaaagaaaaaggatgtaaagttattgcattatgcaatgttataggttcaacaattgctcgtgaagcagatgctactattt

SEQ ID NO: 5552 - DNA, 200 bp, Lawsonia intracellularis
atacccaagcaggaccagagttaagtgtagcatctacaaaagctgtctgtagtcaaatgattcttttagctcttcttgcattgtattatagtcaacgaaaaaaaaccttagatattcagttacaacaaaatattttatctgacttaaaacaactaccacaaattttacaacaatcacttcctactatacaggataaagct

SEQ ID NO: 5553 - DNA, 200 bp, Lawsonia intracellularis
aacgaacttgcaaaatgctactcaacgtcttcaagcttctttttccttggtcgaggagaagcataccctttagctctagaaggagcattaaaactaaaggaactctcatatattcatgctgaaggttatgcctctggagaaatgaaacatggcccaattgctcttattgataaaaatttcccaacagttgtaattgcact

SEQ ID NO: 5554 - DNA, 200 bp, Lawsonia intracellularis
atacaataatctattttctaaatctcaatcgaatattgcagaaatacaagctcgaaatggaccagttattatactcacgaatgcacctcttcattctaacacatataatgaaaatcacttatggactataccaaacgcaggtttttttacaaactttgtaaccctttcagcattacaactttttagttatgaaatggctg

SEQ ID NO: 5555 - DNA, 200 bp, Lawsonia intracellularis
gataccttgggaaagatgtagaccaacctagaaatctagctaaaagtgttactgtagaataactaatcttttttacttatctccttacttttcttttataacttagtaatatatttattatatactactaacttataaacataataaactatcttatgttacaggatacctaattccaattataatctataactaaatct

SEQ ID NO: 5556 - DNA, 200 bp, Lawsonia intracellularis
tgctattatataacatatctagcaacaattactatatatatatatatgtcttattgtactaatttttatatcatattttccttattaaagttaaaaaggatatcaataacacatattatctactttttttatacaatagtacatctatttctttttatacatccttcctatgcaataattgatctaggtacacttggagg

SEQ ID NO: 5557 - DNA, 200 bp, Lawsonia intracellularis
aacaaactcacaagcgtgtgctatttctcctgatgggcttactgttgttggattctcaaatacctacctaggcactaagcatgcatttaaatacaaactaggcagaatgtttgatcttggtacacttggaggaaaaaattcaactgccattgcaagttgtgagtttggtagcattataattggtaattcagatataccag

SEQ ID NO: 5558 - DNA, 200 bp, Lawsonia intracellularis
ggaataatcataaccatgcatttgtatatacagatcatcatggattatatgatcttggtacacttggaggaaaagactcaaccgcaaaagctatctcacatgatgggaaagttattataggttcttcaatgacagaaaatggtgacgttcaagctttcatccaaaaaatgacaacattctttgtaaatgatcaaatattt

SEQ ID NO: 5559 - DNA, 200 bp, Lawsonia intracellularis
ttcactcctcaaggcaatctaattaacttaggaactctaggtggaccattctcatatgcaaccgatctttcttatgatggaagagttattgttggcagttcaagtactccacttggtgaagttcatgcatttaagcatacgcctctattgggaatgttcgatctaggaactctaggcggaacattctcaatagcagagtc

SEQ ID NO: 5560 - DNA, 200 bp, Lawsonia intracellularis
tgtatctcttgatggagatactattgttggttcttcaactacaaatcaaggaacaacccatgcatttaagtatacacctctattaggaatgtatgacctaggaacattaggtggtacttactcaaaagctataaaagtatctggattaggaaacgtagtaataggagaatcatcaatttgtaatgggaatatacatgcgt

SEQ ID NO: 5561 - DNA, 200 bp, Lawsonia intracellularis
ttaagtatagtgactcaacaggaatggttaatttagggaccttaggaggaaatcagtctcaagccataggactttcatattatgggactatagtagttggaaatgcacatacttttcaaaataaaatgcatggatttatacatacagatcaaacaggaatacttgatattggaacattaggtggagaggagtcttttatt

SEQ ID NO: 5562 - DNA, 200 bp, Lawsonia intracellularis
acagggatatcattagatggacaaataatttgtgggtatagtaatacttctaatggagctattcatgcttttatccatcgtactaatatagctgatattcccccaagaccacaatctgtaataagattacaacaacctctttcatctcctgattatactccacctgactctttcagcatcattactagtaatccttccac

SEQ ID NO: 5563 - DNA, 200 bp, Lawsonia intracellularis
tcctacctcagaaacaagctctcttagtaaccatacttctcctccttcctctccctcaacttcaacccctcttacttcttattgtcaccacttcccttcatctttttataaacttacaaatatcacccctctatctagtaatgatacctctatggtcatggcttctcctcctgcctctccttcaacttcaacccctctta

SEQ ID NO: 5564 - DNA, 200 bp, Lawsonia intracellularis
cttcttattgtcgccacttcccttcatctttttataaacttacaaatatcacccctctatctagtaatgatacctctactgttataacctctcctcctgttcattcttccaataaatcttatctatcaacgcctaatagtgataacagcttaaaaaataatgattgtctttctccacaatctagcgctaatagctcacca

SEQ ID NO: 5565 - DNA, 200 bp, Lawsonia intracellularis
atttgtggacctgattcaatattacaaaggttacaagcagtagcaacaaagctggaaatatttcaacaacagcaacaaacctcttctagcagtaatcctgaccaaatagatgggaccttacaacatagctcttacgtttcctcccctcaacaaccttcaagaaattctgctacctatcattcttctaacactgaatctcc

SEQ ID NO: 5566 - DNA, 200 bp, Lawsonia intracellularis
tgatacttctgggaactttacacctccagaagaagaagaagaagagcaacaacaaattattcagagattaggagcaacaaatcctcaattaaaccaagctaactctcaagtaagtacacaaacaacatcttcatcacaacaagtaactcctgaaactgaagtttatattcaccacctatttaacccaagaaaacttgttg

SEQ ID NO: 5567 - DNA, 200 bp, Lawsonia intracellularis
atgtacataatacatcactagcgttagaacttgatgcagcacagttatcaaatattcttgcaaacaattatgaagaaattaaccaagcactcaactctgattgtaatacatttggtccatatggattttgtttaaatgttgggaaccgttatttatcgactaaagactcaaaagtatctcaatctataggtatggttaat

SEQ ID NO: 5568 - DNA, 200 bp, Lawsonia intracellularis
gttgctttcaaatttactccttatttaagaattggacttgctttggacaaagctctaacaaaatacaataatcaatataaaattaaatgttcagaaccgcttacaacattatattgtgtctatgagcaatcaacacagtctacaggaattaagtttaaaataactggaacccaaagaatatctgatgtaaagattgctcg

SEQ ID NO: 5569 - DNA, 200 bp, Lawsonia intracellularis
aatactactaccatatacagaagaaggtaaaggacatacaaaaatgaaaagttttggatttgaggcacaagctggttatgggtttatgttatcttctaattggtctctccagccaattgttggtgtacagcatataaatattactcgaaaaaagtatcaagagtttcctcaagttcaattcccaattacctataaccaag

SEQ ID NO: 5570 - DNA, 200 bp, Lawsonia intracellularis
caggaattcaaataacaaatgtagaaacggctgctcttctagaaggaaaagtaactaactggttcaccatagattttacaggaagtataaaacacattatacatcaaaataataaaagttatactgggactataccatatctaggagagttcaagttacctttcaacacaaaaaaaaaaaatactatgctgttagagttg

SEQ ID NO: 5571 - DNA, 200 bp, Lawsonia intracellularis
gtacaacatttttacttgattctaaacaaactttacgtttacaaatagaatataatcaatctttttttcataaaaaaaataacctttgtgtaacccttcaatattgtgttggattttaaacactaaaatagaaagcagtacctatttattaattattagttgtatctttatttcttatataatattaatagatatatctt

SEQ ID NO: 5572 - DNA, 200 bp, Lawsonia intracellularis
tatgatagttatataattaaattaatttatttagtactattatatgctaagatgtgagcttagctttatattacacatggttaactcactatctatctattaagttgtaacttcttttctttcagttacatattgttcaaactaataactagtaaaaaatgcactcatacctattagctgtacctatgacaattctatta

SEQ ID NO: 5573 - DNA, 200 bp, Lawsonia intracellularis
tactagcagcatgttctccaccaccaataagcataataattacggcaactgaactacaaatagccccctatgccaaaagttccccatgagaaagatttcctaataagatcataaccaaaggagcaacaattaaaggagcataaaattgataagaaaataaaagaatatccattacattttggatactcatagaataatta

SEQ ID NO: 5574 - DNA, 200 bp, Lawsonia intracellularis
cagaactaattcctattaataatgaaaggagtctggcaacaaaggtttctctttaaggatgttcagttaacttaggagcaaagataggctcagctacatcatgaatcaaacatataacagtagcattaagaaaagcatctacggatgacattacaattgaaataacagctgcaatagctctaaccctcttagccctatta

SEQ ID NO: 5575 - DNA, 200 bp, Lawsonia intracellularis
ggaagaataactttcaaaattcgttagcatcctttgttaggttaacagccggagataaaagatcaatctcacctgtaactaaaaaaatggaatcgaaagcaagatagtaaaaaatacccccttagacattattgatgcattacgtccaaaattctttggatatatggaggtaataaagattctcccactaaaaaagataa

SEQ ID NO: 5576 - DNA, 200 bp, Lawsonia intracellularis
aaataatccaataaataatattgatgttaattcattattaaaaatctgtgtatgttctaaggaaatttttgttaaaaaagcttcaattccacctaattcttgaagcccaatccataaaaaagaggaattataattactaatacagtaaattgaacaagatctgttaatacaactgaatgcatactaccaaatatagtata

SEQ ID NO: 5577 - DNA, 200 bp, Lawsonia intracellularis
actaattataataccacaacccaataaaataccttgtgttgatgttaaacttgtatatgtactaaacaatacacccatagctccaacttgagtggctaaaatacctgtacataatacacatcctaaaatttctgcaataatacgaccttttttacctaaattaattcccataatatctccaactggtataccatgtcgaa

SEQ ID NO: 5578 - DNA, 200 bp, Lawsonia intracellularis
agttatccatttttaggagctaatttcataaaaataaaaaagagtgctatagagaatccccataatgttattgcaaaacctatcccaccactaaatgctttagcagcattaccacttgaatagccgccacaaataaaaaatatagataatgtaacaaataaaactaaagaaaggtaagaacgtcctgctattacatactc

SEQ ID NO: 5579 - DNA, 200 bp, Lawsonia intracellularis
attaagattttaacattacgactagctatcataccaactaaaaatacaataagaagataatgttctataattagtatatctattgaagtaatgtattccataaatttatacttttcttaaatattagaactttctttatattaattatataaaatgtttaattgaattaatttatataaaactagtaataataactaaac

SEQ ID NO: 5580 - DNA, 200 bp, Lawsonia intracellularis
attataaataagatattctatctttagaataaaatattaatagttaatttgttacaaataaaagataaaaaataagtataatatactatttactctatagttatactatttgacatagaaaatcatttttcttagagagagtcctcagtttatacaaagacaaacttatttaatttttttttactcctaataatttttat

SEQ ID NO: 5581 - DNA, 200 bp, Lawsonia intracellularis
aaaaaataaaaattactgatattgacttcttactatgatatcttattttatgatatcttatttattattttaaataataccaaaatacactaaactagaaggttagattaataaaaacaatagtataagctataatatccactatatataggaaatgtttcatgagttctcagtacttccaacaaattatggaagatttt

SEQ ID NO: 5582 - DNA, 200 bp, Lawsonia intracellularis
tttaaagaacttgggattgaatcttataaacaacctgaattaacttatgtcttaacagcccaagactttggggaaattattattgctgaacaacctacacaatgggttacactactagctcaaataggagaaaaaccttttgattctagtatattatggtatcaagatatacttattgaaaattcccttttagataaagc

SEQ ID NO: 5583 - DNA, 200 bp, Lawsonia intracellularis
tactcctaagcccagtcttggacttatagggaaaacacttatacaaaatgcacaactccccttagaatacctcacattacaactactaaaacaatggattgaattctttcttaaaattgctgttgaaaatcaaaaaagatttatcgtaaattggaaagaaaatgtataaaactacttactatatttagtagattatatac

SEQ ID NO: 5584 - DNA, 200 bp, Lawsonia intracellularis
ttttacttagagagtattaatcttattgttgcttacaatgctaacacattgtgagttgtttgttttcctataccaatatctatttatcactctttatttctaatttttaaatatcaaaatatatgtattaattattggggttgcattcaaaatctactaattatagcttaccagattaatgatacatatgattttcctca

SEQ ID NO: 5585 - DNA, 200 bp, Lawsonia intracellularis
tataaaaaattattattcaactaacctaatagatcaactccttatgtttattcttatttaactataaataaaggtagtgattatgtatcctataactagtccacataatacttctcaagtcacatacaatattcctaactggacaataaataatgaagaaacaaaattagctaggcttcaaaatgcattggaacaaaaat

SEQ ID NO: 5586 - DNA, 200 bp, Lawsonia intracellularis
atcatataggattatctttaatgaaaacctgtttctccagaacgcctagtttaattgttggtagtattgttggggcaggggtaggttctttatctttaccactttccttaccttcagctactattgcaggtggtattacaacagttggtatacatgcatataatactttaaaagaaaataataatagtagtaaacaaata

SEQ ID NO: 5587 - DNA, 200 bp, Lawsonia intracellularis
ataaatcttattactagttcaatagtatatgacatagttcataataacaataaacttcaaaaagtatgcttagaacctttttctcaaataaaaggtgatttttacagaacattatgccgtttctccattgatgaaacagaacaagcaagcaatggtatttgtcatggccttagttttctttggattcgagaaatgatcat

SEQ ID NO: 5588 - DNA, 200 bp, Lawsonia intracellularis
taatgcaaatgatccaagttctatgaaagaaagcctccagcaattgaaaacaataaatagttttcctcctaatgaacctaacagcattactatacatagagaactatatactaatgatgggtttggttactttaaattactacctgaatgtgaagcttgtacaccaaaatttcacttttgtagagaaaaagaaacctatg

SEQ ID NO: 5589 - DNA, 200 bp, Lawsonia intracellularis
gcacaatagctagtgaagatagacctgagaaaaatcctattacttttgggaagacattaatcaagtccctattagaaagtgagcttagtttcaaccaaaaatatgcaaccattacactaagtttatcttgctcaaattggctagaaaaacatagttgtgctgtctctattgaaacaccacctttaaaaaatgaagagaga

SEQ ID NO: 5590 - DNA, 200 bp, Lawsonia intracellularis
gaagatattgataacagtagccaaccagttataattaattattttgatcctaattatggtcagtttcaacttaaaacatcaatttcagaagctcctcaaactttttctgaattctttcaatatttcaatagtattgcctatccttttgtaaataaaaattactcttgtgaaataatattcaaaccacataaaaatgctaa

SEQ ID NO: 5591 - DNA, 200 bp, Lawsonia intracellularis
aaatagaatacctcaaaatgcattaagattaacattgtgataataaatgagtaattaaaaaattaactacaataattaaaaatagtaaaaataattatatataatatatgctgactacattgtttaattattaataattatatcctcattatagtactaagcaataaataaaaaattgccttactaatgatatgatactg

SEQ ID NO: 5592 - DNA, 200 bp, Lawsonia intracellularis
ttatataaataatataattttactagtatcactatatagtaatatataattacctatactatctatataacaaatatcgttaagaacatatattttataataacgtataaaatctatttttttaacttaattaaaacgtattacaaatttttctacattaactttgtaagatagaaaatattttagcctctgtataaaga

SEQ ID NO: 5593 - DNA, 200 bp, Lawsonia intracellularis
atttttgactaccttcattatattttgtaaactagtataagtaaggaaacaacacaacagagatatcaatacaacaccactagcttactcttgtggaatagatggtaatggatgatgtgctttactgttatcttgtacagaagtcttattgctctgttgttgagtgcctgatacatccagataatttacataaattggct

SEQ ID NO: 5594 - DNA, 200 bp, Lawsonia intracellularis
cttgctttagctctggctgatgatgttgtccctctcctggatttaaactagaaccttctgactgaacttgtctagtcctataggaacataatcctttaactccattaacaacatattgcactccatgaataatagctgctcctaccctacctagactactttgaatcgatgtaaccatccttgacaaaaaggaagacttt

SEQ ID NO: 5595 - DNA, 200 bp, Lawsonia intracellularis
gttttctttagtatagacttaccaggaacagcatctggatcatatgtagttctgacatcacttcctggagaatatacatacgtgctattactactctgatcaaacctaacgcctctatctccagtagtctgttttaatatagacttaccaggaatggcatttggatcatacttagtgttaattctttcctcttcgtgtgt

SEQ ID NO: 5596 - DNA, 200 bp, Lawsonia intracellularis
tacgtcatcttcatgaggataggaataaccggaattgctattttcatcgaatgtcactcgtgggccattattaaaaagtttcattacttttatcctccacatatatactttaacatattgatattattaatatataaatatacattgttatggggactaattataatctaagctgtatattctcaaacaaataatgtcct

SEQ ID NO: 5597 - DNA, 200 bp, Lawsonia intracellularis
atttattaacctaaccaattctatgtaacaattacctaactgactccattcatttcaactatctttagttattcttccctttattaccacttgtagagatagaagttgttttaatttcagcataaatgggttctgttacatgtggacctggtgatacactctttaaattttcgtatataacaggcttcattttaccagga

SEQ ID NO: 5598 - DNA, 200 bp, Lawsonia intracellularis
gaattaggcccaagggtaaaatcaagttctgcataaataggctctgatgaagggttgttttctggaataggaggtaacggacgctgtgcaagaggggtactaggatgaacaactgtagcataaattgtatctggagaatcaacaggatttgatgtaaatggtccagatgtattctcgtgacgaggaactatccttggtgt

SEQ ID NO: 5599 - DNA, 200 bp, Lawsonia intracellularis
actacttactttctttccttctgaagtacctgttgtatctttttttgcatcataatcttttaaagcttgatgtgtacgagcaccaatcattttcatagtagaatgctttaccctctgaagagtattactccatgacgcacgcaatttgcttaaaattgagctctcttttttagtaggctctaaagatttgttttttacag

SEQ ID NO: 5600 - DNA, 200 bp, Lawsonia intracellularis
aactactagtaccagtggcattaccattttcttctactccactattatgactactgctatgtttaaattgaattttcatcttaccctcttacttctttacgttgaatactatcaagtagagcaataacaatcctatatgatatgtaaaaagtatatgtatctcctaactatatgcccaactaaaaactcattaatattac

SEQ ID NO: 5601 - DNA, 200 bp, Lawsonia intracellularis
tctcatagaaatttttacaagacggtaatgtcgttatggaaaaagcaaactaatatatcttcatctacatcctagtattgtcataactctataaaaaatttataattaatcagtaaattttgctaaatagacgttaatctttttcccctgctttgcttcataaaaaatacacatgttagaacacaccaaatattaaccca

SEQ ID NO: 5602 - DNA, 200 bp, Lawsonia intracellularis
tcacaatcttgtctcatttttcttcttccaaacaacgataactcagctaattaatatttagatagtccatactacacaacaatcatttactggtattaacgctatctagacaaataactaattacctttgatagaatcataggtaactatctcctactattttccttttcaggtcagaaaaaaattttaggacaattaca

SEQ ID NO: 5603 - DNA, 200 bp, Lawsonia intracellularis
acaaaaaataattctagcataaagtatacctttaactacttcttaataaaaattcaggggattaactaaagtaatacataaaaaaattgaaggaaataaaacaaaatcaattaatcttgctattatcattttaaagaaagtataaaaacaattttatagtatagttatagtatagttatagtataagatattatgatgta

SEQ ID NO: 5604 - DNA, 200 bp, Lawsonia intracellularis
ttttagcataatgtttactaagtcaaaaaattgattgtaatcagctgttaaaaaggtagaaatatcttgaaagatattcctacctttttaacagctgattacatatttatataaatatttttatgcttgtttcttaaaatatacatagctacatattgtactctctcgtagagggcaaataaaaatgtacattatgttat

SEQ ID NO: 5605 - DNA, 200 bp, Lawsonia intracellularis
gtatagttaaaaaaaacataatatgcttctcagtaatagccttactcagccagactatagttatactccacaaaaaatagtgtatttctcctcatcttaatataaagaatgctcttctttagttacatgaaggggaaaatacaattcaaccatggaggtttatagaaaaagtattcctaagggatagtaagacatttgat

SEQ ID NO: 5606 - DNA, 200 bp, Lawsonia intracellularis
gacatattgataaagactaatattaagcttaacaatatcttattgataagaaagcaacttttttttacctgttacaaactataatcaatattttctttttttaattaaaactcatctaaataaaaatataatctaaggaatactccttaaattatatattactcatcattaataatgttaaaaaatcaaaaataaataga

SEQ ID NO: 5607 - DNA, 200 bp, Lawsonia intracellularis
tatctcaaccaataaaagattatctgtcaatctgtaaaactcttaaaactagataagttacctatagtaaagaaagagattcaaaaaaatattgttataaaaatatctatccacaaactgcactctaaaattgaagttaaatatcttgcatacttctaagtagattactaaaatttactccatagtaacccctaccaata

SEQ ID NO: 5608 - DNA, 200 bp, Lawsonia intracellularis
tttattcttatgtattctctataacctttatttcacgtttattaattaataagctataacaatctatctctttatatcttgctgtattatatataatttctctcatatcaactctcaaccattttaccttaaaagtcgtaccagaaatgaattcccatacattgaggttttatacttttatctttttcaccatcttttgt

SEQ ID NO: 5609 - DNA, 200 bp, Lawsonia intracellularis
acggattccaacattaacaccaactccacaattatgagtaattttaaaatcaatgttacttccaacttcaagctgtttatatcttgatttatctttaccgcttgagatacttactgaatacaatgatattggttttgcggttacacctgtattatttctctctcctaaaatagcagccccccatgcttggattttacaaa

SEQ ID NO: 5610 - DNA, 200 bp, Lawsonia intracellularis
catctgaaatatgccaatcgactttcaatccagctctatgttcaataacatgttctctagttgcacttatttttgcgggtaatatccgaccagattctttatatgaatcccaacgagctgttgcaatagatacttcagcataaggtgtaagcatcatcattggagtaatttctatattataccctacacgtgctatgcca

SEQ ID NO: 5611 - DNA, 200 bp, Lawsonia intracellularis
ccatttgttgaagtatgtgctgcacctttagttgtgatacgttcaccagcatgagtaaatacacgtgtattttttgtttcaccccatccaaatgtgccttcaacatatcccataagccctggttcagctacattccatgcagcaataactgaagcttgatttgtttctgttttagctttagctccaccatatgcttttgc

SEQ ID NO: 5612 - DNA, 200 bp, Lawsonia intracellularis
tatatctactccttgatactctttttttctctccctaccttgagatatagctgtaccaacccataattttggaaacataggtatagcatacattacaccagcttgtgttgaagccccgctatttctttgactacttgcttgtccactgagtgaaccaaatatacggaatggtttctcagatgttaatcgtgctgtattca

SEQ ID NO: 5613 - DNA, 200 bp, Lawsonia intracellularis
tatttaatgctaacactctcatagaattttgtacttcttgtatagctccatgtataacataactcagtccttttacagacccttgatttgctattacattatagcctgattgaggttgtgttggttttttatctttatcttgatatactaataagtttaaaaaatccttcactttctctaataattgtctactatctcct

SEQ ID NO: 5614 - DNA, 200 bp, Lawsonia intracellularis
tgtccttgaatattattagcaccaaaccctggagctggagccatattcccaagaggatttccagaaccagaatctatcaaaataaattcactccaatcaccttcacttcctagatcacttgaactatcactgctatctagatcacttgaactatcctgagtatcactagtataactagtaatgtcactggaactatcatc

SEQ ID NO: 5615 - DNA, 200 bp, Lawsonia intracellularis
aaaatcatcttcgaaatcactgtcatcgaatttatcatcaaattcgtctgcactatcactaacagaaccttcactgttatcagtatcagtatcaatatcagaagaaacctacactaaccccctatgccacatatcttctaactcttgtccaagagactctaattctgatttcaaactttcattttttttatgtatagcaa

SEQ ID NO: 5616 - DNA, 200 bp, Lawsonia intracellularis
aaagttttgcacgtaactcttcattttgattggaaatctggaaaaaaccatacataccttcatacactctttctcctttttctaggtcttccttaagcttaagccatttttgtcttccttgttcataattttcaaccaaacaagaagaagataatgatgatggcgatgataacctatctctctgataatcttgtatatct

SEQ ID NO: 5617 - DNA, 200 bp, Lawsonia intracellularis
tgatgttgagcaatcactccagcaaataaaagctccatagcagctctattctttttatagtcttcactttgtcttcctgtcggctttaaaggctcttttaagctttgtgcattccacccttcttctttaaaaaaaaaagcaccaagtttactttgtgcctctttaaatgcattgtttggctcatctcttggacctatagg

SEQ ID NO: 5618 - DNA, 200 bp, Lawsonia intracellularis
cttctttgttggctgctgtggtggctcatgccgtttttgcataaagacttccagtttggctttagcagtatcaaatgaatcaccaggctctccctcctgatgaagacttaatggacaagaactagatgaatccaccaaacgtccattttgataagagcttgctgagggagaagcagatgactgatctctttctccccttt

SEQ ID NO: 5619 - DNA, 200 bp, Lawsonia intracellularis
cgcttatagtattcctagaatatgtcccatttaaaacagaagaaaacaatgactgtccttgctctaaaaaatcttgtttcattccatgctctacagcactactttcaggatgaggagcatcccaaccatcatcaccccagtcttcatcattatcagagttatttgatgtagttagttttacagaggtagttaagggaata

SEQ ID NO: 5620 - DNA, 200 bp, Lawsonia intracellularis
cttaatctttgaggcttttgaggtactagtggtgcctgttttatagaggagtcttgtgtagtagtagtagtagttgttgttgttgttgttgttgaaatattacttgttgagtctattttcacagacatcttactacttgaacttttagttaatggtttatccacctcttgagttacttttaccacagaagagcttgaaac

SEQ ID NO: 5621 - DNA, 200 bp, Lawsonia intracellularis
tacacttgataatgttgccgttgaaataacagaagagctaactagagaagaaggactggctgaagcaaaaggtgctctcacttgttgcccttctgggactggctgttgtctttcttgactatatgctacttccagtttatgtagtctatgttccgcactttctacattactggcagcttcatttaactttttctgtaatc

SEQ ID NO: 5622 - DNA, 200 bp, Lawsonia intracellularis
taggatcatcaggatttctctcaacttttttatttacttccttatatcttgtaacacacttctcaagctcaactcttgcctttgtaagatctttttttttattttatgtggatcggtcttacctttttgtttacttatagtatgactacttaaatcctcatccctttcacttgaactaacactagaaaaatattttccta

SEQ ID NO: 5623 - DNA, 200 bp, Lawsonia intracellularis
acatttctttaagctctgattctaaaatcccaagtactgtttgagcttgtttaactgtttgaaaggaggcatttaacccctcttttgtttcatgagtactaacctgctgtgatctaagatcttctaataatttttttgcttcttcaattttctctacttttttttgtatttcttttcctgaaggctgatgtgatttatgt

SEQ ID NO: 5624 - DNA, 200 bp, Lawsonia intracellularis
ttagaatgatgaagaggttgtttcacttgtttaacatgctgtctatcactactttctctatctgaagcaaatactttactctttccacataacaaacaaagtaaataaaatgttgtcaaaatcagttctttttttaaccatcttgctcttaaactctttttacagataaatttagttgtaagaaactttaataaaatttg

SEQ ID NO: 5625 - DNA, 200 bp, Lawsonia intracellularis
ctttactcttataataactgtaaaaaaatatatatatatatattattttaattacattaaataaaaatgtatctatattcttactaaattttatatacataatgcatttctccataaaatacactataatatatttatcgtgtaataataaattatatataaattatgaaaaattttttatgatctataaaaataattat

SEQ ID NO: 5626 - DNA, 200 bp, Lawsonia intracellularis
ttaagtataaataaatataattataaataaatgtatgtagctacattactatattgaatagatatatagaaaattatgaataaataaattgttaaaatctatattaacattatttataaaattaaatatttatgttttattataaactttattgaataataaagagatacgtataaaaacatacaattaaaaattaactg

SEQ ID NO: 5627 - DNA, 200 bp, Lawsonia intracellularis
catgtatttatattactataaaaaatacatatgtagtagattataaataaattaaattatctaaatctatattactatatttatatagataatatgttctactttattagacactattttgatatgtaataagcaaaaataaagactgttaaaaattaactatgttcttttctttgatgggacaagtgatatgaaggaat

SEQ ID NO: 5628 - DNA, 200 bp, Lawsonia intracellularis
tactatagtaacaaaatatcctaattttttaccatattaaactactatttcaataggttaaacaaactcctatttattttttattataactaataaaaacaaaatatacttttatcctaactgaggaataagtaaaatatattttaatatattttatgtcaactaaaaaattatttttacatactttttataaagttaaa

SEQ ID NO: 5629 - DNA, 200 bp, Lawsonia intracellularis
ggtataatttattattttactataaaaaactattttttatttgtataactatttaacacatagctatataaaagtataatcagtttttatatagtataatacttcttatatagtactatatacatatagatataattattttttacatagattatacaaaatattttgactattgatacatttatattatattcagcagt

SEQ ID NO: 5630 - DNA, 200 bp, Lawsonia intracellularis
aaacagtagaggatattatcatttttttgacttacaaaatattttcattttgtattttatacaaggctaattatatcgaataaatgttctttataaggacaatatagtcactcatcatgaatacaaaatatctttttatatctaaaatgaaaaattacctaattcctttaaactaattctttttaagcaatattataata

SEQ ID NO: 5631 - DNA, 200 bp, Lawsonia intracellularis
tataaatatattataaaaacatatcataactcttagaaagaacataaacctttcagcttgagcacaaacagcaatcataaagcatctcgagcatgtgtatctctaacaactatttcacatctattataaataaactcttattttaaacgtcaaattaatgactgccttgtttactcccataaataacacaaccacattta

SEQ ID NO: 5632 - DNA, 200 bp, Lawsonia intracellularis
tacaaatcgatccttcctgttgctatctttccactttctgctagtgagcaaaaactttaaaaaactatatgttatcaataattgttgctttaaatgatgttaggagatggaacctcaaggacataaaataaaaaagtttatctcctccataggacatccattttacaataataccttaacaagagataattcattaatct

SEQ ID NO: 5633 - DNA, 200 bp, Lawsonia intracellularis
tttgaaaacacaaatgaaaataaaaaataactactaactataatataataatttatctattaatttagaatagttcataatcatatagctaaaagatatccttaactactttgtaataaaacttaactgatacctatttttgttattaggagttttagcaatatttttatccttaaccttcacttttaaaaaagtatagc

SEQ ID NO: 5634 - DNA, 200 bp, Lawsonia intracellularis
actggcaatacataacactacaccttcttaagctcacaggacatacaatgattggctctttttagaaaaattgaaagttattaactaaaaagatacgtttggatttataattaaatagaagacacaatccagactatttaccaaactaatcataataacaaactaatttattttaatgtattatcaataagtactctata

SEQ ID NO: 5635 - DNA, 200 bp, Lawsonia intracellularis
cattaaaaagtcaggataaaaacaggataaaagcagataaaattataggataaaattataagatatgaataacacctttaaaatactggtcgggatggcgagattcgaactcacgaccccttgaaccccattcaagtgcgctaccaagctgcgccacatcccgacgggctgacagatacctttaatatgacaattatgtc

SEQ ID NO: 5636 - DNA, 200 bp, Lawsonia intracellularis
aatagacttttcttaccttatttgtatataattattaaaataataactagcagattgtcttagcgtacatactgtatctaaaaaataaacctatgaataaacgacattgattatatatacattacctgttaaagaattatcttattttaataattagttaatgttatcatttttttactatttaatgataccgataaagc

SEQ ID NO: 5637 - DNA, 200 bp, Lawsonia intracellularis
agcttttggaggactccaatgattcagacttcccctattccagttaatctttctttaccctataaaattgctgatatctctctagcagatttcgggaaaaaagaaatgcaactttcagaaagggaaatgcctggtcttatgacattgatccaacgctataaggagaaaaaacctttaaaaggcctaaaaattacaggttc

SEQ ID NO: 5638 - DNA, 200 bp, Lawsonia intracellularis
tttacacatgactatccaaactgctttacttataaaaacactttattacttaggtgcaaatattcgttgggcctcatgtaatattttctcaacacaagatcatgctgctgctgctatcgcagacctaaattatgccagtgtttttgcatggaaaggagaaacattagaagaatactggtggtgtatagagatggcactta

SEQ ID NO: 5639 - DNA, 200 bp, Lawsonia intracellularis
catggcctgatggttctggccctgaccttattattgatgatggtggagatgctacacttataatccataaaggggtagaaatcgaaaaaaatcctgagttattaaaacaaagccatagtgataaagaaataaaaattattatggatcgacttaaagtaatgtataatacttctcctactcactggacgaaaatagctaaa

SEQ ID NO: 5640 - DNA, 200 bp, Lawsonia intracellularis
aatattcgtggagtctctgaagaaacaacaacaggggtacatcgtctttaccagcttgctgaagaaaataaacttcttttccctgcaattaatgttaacgattcagtaacaaagtctaagtttgataacctttatggatgtagggaatctttagcagatggaattaaaagagctacagatattatgatcgcagggaaagt

SEQ ID NO: 5641 - DNA, 200 bp, Lawsonia intracellularis
agttgtcattgctggatatggtgatgtagggaaagggtgtgcacagtctatgcgcggctttggagctcgtgtaattattacagaaattgatcctatttgtgcattacaagctgctatggaaggctttgaagttatgacaatggaacaagctgcagctgaaggcgatatctttgtaacagctacaggcaaccttcatgtta

SEQ ID NO: 5642 - DNA, 200 bp, Lawsonia intracellularis
ttacacataaccatatgaataaaatgaaagatgaagctattatttgcaatattgggcactttgataatgaaattgaaatgagctggctagaaaataattcagaatgtaaaaaagtaaacattaaaccacaagtagataaatgggtcctccccaatggacgatcaatgattgttcttgctgaaggaagacttgttaatctt

SEQ ID NO: 5643 - DNA, 200 bp, Lawsonia intracellularis
ggatgtgccacaggtcactcaagttttgttatgtctacaagctttacaaatcaagtccttgctcaacttgaattagcccataataaattagaaaataaagtctatattcttcctaaaaagcttgatgaagaagtcgcacgcctacaccttgaacgtcttggagtaactctaacaacattaacacaagaacaagctgacta

SEQ ID NO: 5644 - DNA, 200 bp, Lawsonia intracellularis
tattgatgtccctattgaaggaccatataaatcagaacattacagatattaaaaataatatttaactataaatttaataatgctagttaaccatattcaaaatatattttttaatatattgtatattccaataataaaaaatataattaaaacaattaatggattaacacttatatattttgctgaataatagcatatag

SEQ ID NO: 5645 - DNA, 200 bp, Lawsonia intracellularis
catttaacatggatatacccccaacctcttctaactaacgtttctaacttaatagttaatttttactaattacctatcattctacctaattcaatatgtttttattttttatattgcataaataaggaaatactcatgagagtagcaattatatcatcttcttttgctcgatatgataaaaaaccacttgaactacttag

SEQ ID NO: 5646 - DNA, 200 bp, Lawsonia intracellularis
ccaagctggaattgaatatatccttaatgaacaggggtatcatctcactgatgaagaactaatacaaataatagatggttgtgctggtatcattgttggttcagaaccattacccaaaaaagttttagagactaacccaagactcaaaactattgcttgctgtgggaaacatcttgataatattgacgttgaatatgctc

SEQ ID NO: 5647 - DNA, 200 bp, Lawsonia intracellularis
aagaaaaaaatattattatttataatcctcctaaaggttatgcaattgctgttgcagaatttacagtgggccttatcctatctcttatacgtcaaataccataccaagataaagaagttcgttcaggagtatggcataaacgtataggaaatcttttacatgggaaacgtgttggtatcataggtcttggacaagtagga

SEQ ID NO: 5648 - DNA, 200 bp, Lawsonia intracellularis
aaagcagtagctgaacgactattaccatttggtgtagacattgcttataatgatccaaatgtatatagtactacattccaaaaatttgatcttgataaacttatagattggtcaaatattattactattcactgtagtaaacctataaaagccggccctattcttgacttgggaagactttcactaatgcaaccaggaag

SEQ ID NO: 5649 - DNA, 200 bp, Lawsonia intracellularis
ttatattattaatgtagcacatggaggattaattgatgaaaaagcattatgtggacttttaactgcaggtcatttagctggagctgctctggatgtctttgggaaagaaccatatgatggtcttctaaaaaatattaataatacaattcttacaccacacataggagcttatgcaaaagaatcaaaaataattatggaaa

SEQ ID NO: 5650 - DNA, 200 bp, Lawsonia intracellularis
cagatgctgtaacaaacatcattgatacattaaaaaactcctaatttaataattgctccttaacaaaaataaacatgtttgatacctctactcttaatagtgctcaacttgaagctgtcactgcaccagatggtcctgtccttgttattgcaggagcaggtagtggtaaaactcgaactattatctatagacttgcctgg

SEQ ID NO: 5651 - DNA, 200 bp, Lawsonia intracellularis
ttagctgaacaaggtattcccccatcttctatgttacttcttacctttactcgtaaagctagccaagaaatgcttcatcgtgctacaatgcttcttaattatagtcttggtgacgttaatggtggaacattccatagcatagctttttctactctacgtcaatataaaccctcctgggcaacagggaaagtcactataat

SEQ ID NO: 5652 - DNA, 200 bp, Lawsonia intracellularis
agatgcacaagacaccctaacttctctccaacactgtaaagaagaactcaaaattgctaaaggtgatcgttcgtttcccaaactacaaacagttgcagctttattaagtagagcaagaaataaagaaataacatttaaggaacttatacaaaaagactctcctcatcttatctcccatattgattcattaacaactcttg

SEQ ID NO: 5653 - DNA, 200 bp, Lawsonia intracellularis
ttgaacgttatactacatataaaaaacaacaaaatttacttgattatgacgatcttctttttgagtttgaattacttcttaaaggtgatgaatcaaaaaacattcctccattagctccattatttcaagaacgttatcaatatattatggtagatgaatatcaagacacaaatcgtgtccaagcacgtcttgttcggctt

SEQ ID NO: 5654 - DNA, 200 bp, Lawsonia intracellularis
ctttctggaaacacaaataatacaatggctgtcggggatgatgcacaatctatttatgcttttagaggagcgacagtaaacaatatcctagaatttcctaatctattcccagggaccaaaattatacgtctagaagaaaattatcgttctacccaacctatattagatacagcaaatgctatacttaaagagtcacaaga

SEQ ID NO: 5655 - DNA, 200 bp, Lawsonia intracellularis
aggttttcataaacatttatttactaatcgtataggaggagaaaaagttcgccttatacgatcattaagcgatcttactcaggcaaatcttattgctaatcgaataaaagaattactatctatatatcctcccaaagaaattgcaatcctatttagagcaggatatcaatcttaccatttagaaattgctcttgccaagc

SEQ ID NO: 5656 - DNA, 200 bp, Lawsonia intracellularis
atactattcgattcagaaaatatggcggcctcaaatatactgaagctgcccatattaaagatatgatggcatttataaggcttattgttaatccactagatatgccatcatttttacgtattgctgccttttcaaaaggagttggccccaaaacagctcaaaaaatttaccaaatagcagcacaaggaaattttttagag

SEQ ID NO: 5657 - DNA, 200 bp, Lawsonia intracellularis
cttcaaaaagtttgtaataaataccctgatcttcttagtgatatgactctacttgatgagatacgacaacagcctttagaacctacagaaatattaaccaaagtctttgaacattatcaaccaaaacttatagtccatttccctgaagattggccacgccgtcaacaagggcttgaagaacttatacatattgcttctgc

SEQ ID NO: 5658 - DNA, 200 bp, Lawsonia intracellularis
ctatacagatcttgaacaatttattgccgatctttctttagagactccagaagaagagctgaatgaagaagaaagcattgtgctttctactattcattctgcaaaaggtcttgaatgggatgctgttattatccttgacttagtagaagatagatttccttctagacattcgcttatacgctctgaagattttgaagaag

SEQ ID NO: 5659 - DNA, 200 bp, Lawsonia intracellularis
aaagacgccttatgtatgtagcatgtactagagccaaaaaacagcttgaactttctgttcctactacactctataataaacaatatggatgcaatgaacctgcaatcccaagcccttttgtacaacaacttccaagtatagtaatagaggagtggcaagaaggttattcaggcaacatatataaaaaaattacaatacct

SEQ ID NO: 5660 - DNA, 200 bp, Lawsonia intracellularis
actaatcaaccagatagcaaaacatgttcccaaatacctgcttctaacaatacatataataaagaagagttatcttatagtttttgtcgacacaaaatttttggtagaggtaaaattatagaatatttattacctgataaatgtagagtaaacttccctggatttggccttaaagttatcttaaaagactacctaactat

SEQ ID NO: 5661 - DNA, 200 bp, Lawsonia intracellularis
tgaagattaataataaagggatattatgaaccagtattcttcattggtttcagaagaacatatcctctcgtgtattaataaatattttcctgatcaatctcattttatcacagctggtagaggtgatgactgtgccatactttctgtaacatcacctctatgtattagcactgatatgtttattgagaatattcactttc

SEQ ID NO: 5662 - DNA, 200 bp, Lawsonia intracellularis
gccatagctactttagtccagaagatattggttggaaagcattagctgtaaacctaagtgatatagctgcatgtggggcacaaccaataggctttactgtaggacttgctttacccttaaatacatctatagatattctagaaggaatatattctggaatgtcccgtcttgctaagcaatttaacttaccgttattagga

SEQ ID NO: 5663 - DNA, 200 bp, Lawsonia intracellularis
ggagatctctcccaagcatcagaactctctatttgtattacaatattaggggaaactcatgctcctttattaagagcccaagcacagccaggggacattatttttataataggacaagttggacttgctcatactggacttcaacttttagaacaacaggggacaaaagctattgaactatatccaaaatcatgtatggc

SEQ ID NO: 5664 - DNA, 200 bp, Lawsonia intracellularis
tcatttaagaccttttcctcttattcatgaaggtcttgctctttcaaaaatggcaaaaagttggtctcagcaaaccaacactcctcacagactagcattaatagataactctgatggtcttgcacaagatattcctagattactagggaaaggaaaaggagcagatatcaccatacctgcccttgatcatgaaatcattc

SEQ ID NO: 5665 - DNA, 200 bp, Lawsonia intracellularis
aattcattgagtcacattatacagaaaatgaatactctcctgacttacatgcagttataggaggtgaagactatagtcttattggtacatgctctcctaactttggagcaaaattaaacatggttatatctaatcttactattattggttctgttacagactcagaacctatcttatttaatggacaacaaatgcaagga

SEQ ID NO: 5666 - DNA, 200 bp, Lawsonia intracellularis
tttgatcactttagggggaattatattaacccctcgaacaaattatagaacatatatctataacttaatgtagttatacattctccttagcttcattaatccattgcataagtggtgtctccacttctttacggatagacattaaatgctcttctgtgtctgcttcaaatcgtgttactaatacaggttgtgtatttgat

SEQ ID NO: 5667 - DNA, 200 bp, Lawsonia intracellularis
gctcttactaaaccccaaccataagggaaattaattctagcaccatcaatttcaattgtttcatattgagatttaaaataattttttactttttcaactacagcaaacttaattgtatctttacaaggaatattaatttctctagtagcaaaagaaggaggccaaccaggaagttctgacattggtttttcttgagcaga

SEQ ID NO: 5668 - DNA, 200 bp, Lawsonia intracellularis
aaataaacttactaaacgagctgcgccataaatagcatcatcaaaaccataccatccatctgaaaaaaacatatgtcctgacatttctcctgctaatggagcattaagctctctcattctagcttttataatagagtgacctgttgctgacatcacaggatttccaccatgcttctggatatcatcaaaaagtctatttg

SEQ ID NO: 5669 - DNA, 200 bp, Lawsonia intracellularis
aacacttcacatctccaataacaattgaacctggcttatgtacaaggagttctcgtgcatagatagacagtaattcatccccaaataataaacgaccatttgaatcaatgatacccaatctatcagcatcaccatctaaccctatacctaaatctgcatgttcagctttcactttattagccaaatctttcatattttct

SEQ ID NO: 5670 - DNA, 200 bp, Lawsonia intracellularis
tctaccacaggatcaggatgatgatgaggaaaatttccatctggctcacaataaagacaggttacctctgcacctatcctctttaaaatatctgcacaaatagtaccaccaacaccattgcccccatcaacaactactttaactggacgtaacagtttacaccatgcttcaacagcagccatatatgatggtataatatc

SEQ ID NO: 5671 - DNA, 200 bp, Lawsonia intracellularis
atggaaagataaaacaccttgccctgaagcaaacgaacctacttcaaataatttatgtatactttgaatctcatcaccataaattgtagattcacctgcccaaatcttaaagccattatattgcgatggattatgacttgcagtaatcataacaccaccatgacgattcaaatacttaactgcaaaatataaaactggcg

SEQ ID NO: 5672 - DNA, 200 bp, Lawsonia intracellularis
ttggaatcatcccaatactaattacatcaactccagttgataacaatcctttcactaatgcattattatagtccaccgatgattttcgacagtcataacccacaacagccgatgaaataccctgacttacaaaatatgttccaatgaccttacctaacttttctacccaatccaaatcaaaatctacatctacaatacct

SEQ ID NO: 5673 - DNA, 200 bp, Lawsonia intracellularis
cggatatcatatgcacgaaaaacattacttgttcccatgaattctccctatttattgtacaaaaattaatataataaaattatttttctcatagtataaaaaaattctatcttaatcctgtagaaaaccttattaaataatcattctacaactatttcataaataatgccagtaaactaaaatcaatatacatactatat

SEQ ID NO: 5674 - DNA, 200 bp, Lawsonia intracellularis
tacctcttataatatttaagattatagatatactactaaaaatatatacacttctaaattaaagttaaatttagtaacttccttgaccgtaaaaatattatgttctattgttatccattatgaattgggactgggaaaagctacaagaaaaacgacagaggcaaaactggggacaaggtcgtacgccaaaagactcaggt

SEQ ID NO: 5675 - DNA, 200 bp, Lawsonia intracellularis
aataacacaccaccaccaaatggctcagatcctaaccctgaacaactttttggaaattttttcaaacagttcagacttaaacctaacagtgggaaagtaaaatggattatacttatccttatttctttgtggttattatcagggatttatattgtaaatcctgatgaacaaggtgtagtcctccaatttggaaaatataa

SEQ ID NO: 5676 - DNA, 200 bp, Lawsonia intracellularis
ccgtacagttgatgcaggcccacactatgctctaccttaccctatagaaacagtatataagccaaaagttacccaagtaagacgggtggaagttggctttcgttcaacctctcttggtggtacatttcaacaaggtgctacacgaactctacctgaagaagcatctatgttaactggtgacgaaaatattgttaatgttc

SEQ ID NO: 5677 - DNA, 200 bp, Lawsonia intracellularis
aatttagtgtacaataccaaattaacaatcctgtagaatacctttttaatgttactaatcctacagcagttattaaaagtgcagctgaagctgctatgcgagaagttattggtaatagtatgattgactctgctctgactgatggaaaacttcaaattcaaaatgaggctacagaattattacaagaaattcttgatcgt

SEQ ID NO: 5678 - DNA, 200 bp, Lawsonia intracellularis
tacaaagttggtatacatgttttagcagttcaactacaagacgtacatcctcctaaagaagtaagtgactctttcaaagatgttgctagtgctcgtgaagataaaagtcgtattattaatgaagctgaagcatatcgaaatgagcttatacctaaagctaggggactagcaacagaaattgaaaataaagctcaagcata

SEQ ID NO: 5679 - DNA, 200 bp, Lawsonia intracellularis
caaagaaacacgtattcgtaatgcaaaaggtgaaacagcaaaatttcaagctttgcttttagaatataatcaagcaaaagaaattactaaaaaacgtatgtaccttgaagcaatggaagggatattaagtcaacctggtatagaaaaaattattcttgataacaaagttgctggaaaagccttaccacttctaccccttt

SEQ ID NO: 5680 - DNA, 200 bp, Lawsonia intracellularis
cccaaaaaggactctcagaatattctgtaccaaaagataaaataaaggaaaataagtaaatgcaacacaaaatttctattcttgtgagtgtactagttattatccttattattagttcacaatccattttcattgtaaatgaaacagaaaaagctcttgttttacaacttggagatcctgttgatcgtatttttgggcca

SEQ ID NO: 5681 - DNA, 200 bp, Lawsonia intracellularis
ggattacattttaaaatcccatttattcaaaaggtaattttttttgatgccaggatattagattatgatgcacgtgcagctgaggctcttacaagcgataaaaaaacaatagtccttgataattatgctagatggcgtattgttaatccattagaattttaccgcaccgtcagaactattcctggagctcaagcacgtct

SEQ ID NO: 5682 - DNA, 200 bp, Lawsonia intracellularis
tgatgatgtagtatactcacagttaagagctcaagtcggtagccatactctcactgaagttgtatctcaaaatcgtagtaacataatgtcagatgttacacgccgcacttctgatattatgaaagaatatgggattgaagttattgatgttcgtatcaaaaggacagatctcccttcagaaaatcaacgtgctatttttg

SEQ ID NO: 5683 - DNA, 200 bp, Lawsonia intracellularis
gccgtatgcgtgcagaacgtgaacgacaagcaaaacaataccgctcagaaggtgttgaagaatctactaaacttcgctctcaagcagacaaagaacaagcaattatcttagcagaagctaatcgtaaggcatctattatacaaggtgaaggtgatgctattgctacaaaaatatatgcagatacattccaaaaatcacca

SEQ ID NO: 5684 - DNA, 200 bp, Lawsonia intracellularis
gaattttatgaatttcaacgaggtcttgaagcacttaggaacggactaaaagaaaatactcatatggtcatcacaaatgatgatctattctttcgccccattcaaaaataatatgaggcaaactctccgggagaacgctatgactttctttcaagaagtttatgaccgagttcgatttgccacaaatacaaagactcaag

SEQ ID NO: 5685 - DNA, 200 bp, Lawsonia intracellularis
ctgaattggcaaatatacttgaaattagacagtctagtatatccgatgcaaagcgaagagattctgtcccccctgaatggtatataaaactctttgaaaagtttggattaaatccggattggattaagcaaggagtggggcctatgtatctccgaacagaacaaggatatattcctagagagcttccattaacaggtgta

SEQ ID NO: 5686 - DNA, 200 bp, Lawsonia intracellularis
caagaaacacctatgcattatggtgatcctatctcaaaaagtgtattacatactgtcttttctatgaggtgcaattacatagaaaatagtaattcactacctatcttacagcccactgggaaaattgcattacctcaaccatatacaggagcaaatatccttgtatttcaaaccgagtcagatgcgtttcttcctctagt

SEQ ID NO: 5687 - DNA, 200 bp, Lawsonia intracellularis
tcgtcggtatacctatctaggtattaatacagactttacacatcctcaatctggagaaatttacgctgtttttatgccatatgaaggaatagctcttaaacgtctttttttaagtacacaaaaaaatggtttttgtttatgtacagatcaaaatgatagtcacgaaagcttcttacctgctcaagaatgtcctatacgta

SEQ ID NO: 5688 - DNA, 200 bp, Lawsonia intracellularis
tactaggccggcttgcttgggttttccaaaccttttaaatattaacattaatctataatattaataaactaaaatttagttaccctaacagaacttctaataactatctgctagggcaactaaatcatatgaatgagattccataatatcggcctctatgagttccccaggctttatatttggtccacttatatatacca

SEQ ID NO: 5689 - DNA, 200 bp, Lawsonia intracellularis
taccatcaacttctggagcttgaaaccatgctcttcctgtatacaactctggccactctggatgaacattgtctacaataagggataaccgcttaccaacaaaatttttaagccatttttcactaatttttaattgaatttccattaattctgcttttcgttgttcttttactttttcaccaacttgatttggcatgaca

SEQ ID NO: 5690 - DNA, 200 bp, Lawsonia intracellularis
gctgccggagttcctgcttcagctacatatgaaaaaatacctaaatgctgaaatttaatttcctctataaatttgcttaaatatacatgatgtccctctgtctctccagggaaacctgtaataactgatgttcgaaggacagcttcaggaaacacagatcgaatattatctataacttttcttggattttttgcaaatgg

SEQ ID NO: 5691 - DNA, 200 bp, Lawsonia intracellularis
tcttcccatacaggaaagaatatctggatgtgcgtgttgtattggaacatcaaaatatggaacaaaaggttcacctaccgatttcaaataaagtaaaaaatcctttgttaatcctgtaggatatagatacataagtcgtaatcgctttaatccatctaaaactaataagtgatccaatagagtttttaaaccatagttat

SEQ ID NO: 5692 - DNA, 200 bp, Lawsonia intracellularis
taggaagatctctcccccatgctgttacatcctgagcaacaagtactagctcttttactccttgatcaagaatatgacgactttctttaacaagttcatctattgaatatgagtgtaacgaaccacgtatagaaggaattgtacaaaaagaacatgagtgttgacagccatcacttattttaagccatgcataagatttg

SEQ ID NO: 5693 - DNA, 200 bp, Lawsonia intracellularis
cctgtagttattatacgatcagtgactaaaaatgtagactttatatttaatgctaacaaaatttgttcgttccaactttctatctctttattatcaagccataaatctacttcaggaatatctttcttcaaaattttttcaccataacgtccaacaaaacatccagcaactataataaaaggtttttcagataactcttc

SEQ ID NO: 5694 - DNA, 200 bp, Lawsonia intracellularis
aacatcagcaacaagttgtaaaatagtatttacagactcttgaacagctgtgtgtataaaactacatgtattgataaaaacaaaatcggcattattaggataatctataaaagttaaaggaatacctaatgaacccaataatctttcggtatctaccctattttttggacaaccaaggcttatagcatgacaacgtaatg

SEQ ID NO: 5695 - DNA, 200 bp, Lawsonia intracellularis
atggagagtgactattcataaaataacctcaataaaaacttgacccattacaatgttaaggtcactgtatggcgataaaaattacctaatataccttgctaacgacataaaaggaatttcaatggattcatccttcaaccttcaagcacctgatataaaaactacagaaaaaaacaatgctatccctacagtaatacttg

SEQ ID NO: 5696 - DNA, 200 bp, Lawsonia intracellularis
ccacacgaaatacagggaaaattcaagaattaaaagatatgttatgtaattttaagttacatatactttgtcttgaagattttcctgaaattccagaaatagaagaaacaggcaaaacttttgaagaaaatgcattaattaaagctaaggtagtatcacaatatacaggactcatagctattgctgatgactctggactt

SEQ ID NO: 5697 - DNA, 200 bp, Lawsonia intracellularis
gaagttgatatattaaacggtgccccaggtatatattcctcaagatacgcagaagatataccaaatatacataatttaacaatagatcaacataacatatcaaaacttctttccatacttacaaacgttcccttaacacaacgaacagcaaaactatgcacaacaatagttgcctataatacaaatggaaagtatatcac

SEQ ID NO: 5698 - DNA, 200 bp, Lawsonia intracellularis
tgcaaaaggaataacaaaaggtttaatctcattaacatcaaaaggaaataacggctttggttatgatcctattttttttgatactaacttaggaaaaacatttggagaactccctcttaaagaaaaaaaacaatatagccatagaacaaaagcattaaagaaacttttagaattatggccaacattatataatgagatat

SEQ ID NO: 5699 - DNA, 200 bp, Lawsonia intracellularis
aatagttgtattctactattctactttcatttttttataaaataaacaaagttttggtctagttatcatgattaatttactaaatattacttatcctgaatttgaatcacttattgtaactacgcttcaagaaaaaacatatagagctatgcaaatatggcagtgggtttggcaaaaacaaataacagatattgagtcaa

SEQ ID NO: 5700 - DNA, 200 bp, Lawsonia intracellularis
tgaccaatttaccccaaaaaattcgagcttctcttactgccttaataaaaattaatttgcctgaaatagttacaatacaacagtcatctgatggtactaaaaaatttctacttcgtctttctgatggagctttaatagaaactgtcctaatacctagcatagataaagcaggaaatataagaataacacaatgcttatca

SEQ ID NO: 5701 - DNA, 200 bp, Lawsonia intracellularis
tctcaggttggatgttctatggggtgtactttttgcagtacagctacaatgggatttattcgaaacctgacagcaggagaaattgtaagccaagtacttttagcaaaactacacttaaacgataataagccagataaacctattatccgtaacattgtttttatgggcatgggagaaccactactcaacctaactgaact

SEQ ID NO: 5702 - DNA, 200 bp, Lawsonia intracellularis
tacacgtgctttacatatcttacattcagaaaaaggactaaacttctctgctagacgaattactgtttctacctgtggcataaaaaaaggaatccaagccttaagtgaaaatggcttagccttcttagcactatctctccatgcctctaatcaagagctacggagtacaataatgcctaaggctgcaaaatgggatctta

SEQ ID NO: 5703 - DNA, 200 bp, Lawsonia intracellularis
aagaacttatagacacactaaaaaattattccctaaaaaaaagagaaaaaattacatttgaatatttactattaggaggaattaatgactctcctgaacatgcaaaagaacttgctaaacttattactgatataaaaggaaaactcaaccttattccttataatcctgcgcaaggacagccttacttaaagccaacagaa

SEQ ID NO: 5704 - DNA, 200 bp, Lawsonia intracellularis
gaaaacattctcaaatttcaaaaagtattatggtctaagggaattgttacgatcctccgtaaaagtaaaggacaagacattaatgcagcttgcggtcaactaaaaacaacttatctctctcagtcttctagcactatttattaaatataataaaaattattgctctaacatagatattataagagatgcacatttatctg

SEQ ID NO: 5705 - DNA, 200 bp, Lawsonia intracellularis
cccctccctttctgctctcaagccaagtattaaaacgtgatataatctcctcttttggttcaggatgttgtaactgacgttctaactgttctattaattcaaacggagtatgacaaattctaataaaaaaagaaaaatcttcatgttctacatttaatggctcaaaaacccatgaaaaattatctaagtacttaccaaca

SEQ ID NO: 5706 - DNA, 200 bp, Lawsonia intracellularis
catggaatttttccaacacttaatggttcaagaaaattttgtcctccaaggggtactaagcttccaccaacaaatactgcttgagctaaattatatagcttatctaactctccaaatgtatcccaaattataactggtatactagtttgatatagttcttctttatatggtgttaaaacagaccttagctgagtggttat

SEQ ID NO: 5707 - DNA, 200 bp, Lawsonia intracellularis
tccaacaaaatttaatttttttatccactcttttactctagattcatgccgtggtgcaactataatacaagtatcttttccatgacgagaatatagttttttaataacaggaactaacaatgcctcttcttcttccctaactgaagctaacaatataataggtttatcaggtaaaatttcagtcaatacattttttgagg

SEQ ID NO: 5708 - DNA, 200 bp, Lawsonia intracellularis
aatcgctttgagataatgtacaaattgctctatcaaacttaatatttggtaccactcctacacaatattcaccaaaaagagcagtaaaccgtgctgcatctgcagaagaaatagccgctacatacttaggtgctatagctctccaaaattctgggaaaaaccaactaaaccagtcataacctctcaaacttttttctctt

SEQ ID NO: 5709 - DNA, 200 bp, Lawsonia intracellularis
acacgtccattaagaactaagactggaatatttcttttattacaggcaaaaagtagcccaggccatatttctgcttctattaatactactaactgtggagagacttgtattaacgctttttccataagtgcaggttcatctaatggaacatattgaacttgaatagaaagatctgatcgagaagattctaaaatactttt

SEQ ID NO: 5710 - DNA, 200 bp, Lawsonia intracellularis
tgtttcttctaaaataatacggccttggggagtccaagttgtaagaagaatatgtagagtggaatcctgtattggtaaatgttcaagtaatgaacgtactaagtaggcttctcctcctgaggaagattgaatccaaatagttgcaggctctgcccaattagtaggaactagacgttgagaaaaattttcatgtaaccgtt

SEQ ID NO: 5711 - DNA, 200 bp, Lawsonia intracellularis
tatgttgttgcaaaaatggtctagcaagacgccacaaaaaggtatacccttttgaaaacacatcaaaactattcactcttttatttcctatgatctctgattgcaagctgaatcaacttttcaactaactctgggaaagtgagccccatagctgctgcctctcttgggacaagacttgtagcagacattcctgggattgt

SEQ ID NO: 5712 - DNA, 200 bp, Lawsonia intracellularis
attaacttccaaaagaaataacaactcatcgtctctaagaataaagtctgcccgactacatccctgtaaatttaatgtattatgagctctaagggcatactcttggatatgttttaatacatgaggctcaagaggcgcaggacaaatttcctctgcaccattcttagcatacttattataataatcaaaaaatttaccct

SEQ ID NO: 5713 - DNA, 200 bp, Lawsonia intracellularis
gactacgtattaaaataggaggtaatgcttgatcatcaataacaccacaagttacctcttgtcctataatagcttcttctaataagacttcctcacctgcattaaacaatgcttccatagcaataaatagctcttcataattagttaccagatgtacatttacacttgagccaccaatattagatttaacaaaaattgga

SEQ ID NO: 5714 - DNA, 200 bp, Lawsonia intracellularis
taatttaacccaggttcccaagttacttctggctttaaaggcagaaagacacttttgggtgtaagaagcccttctctacggaaaagagctttagctgcagctttatgtagtgcaagcagtgaacctgctggacttgccccttggtagggacagcccactctttctaataaagcttgtaatattccatcttctcctggtga

SEQ ID NO: 5715 - DNA, 200 bp, Lawsonia intracellularis
accatgtagtaaaataaatgcaacatcttgcttttcagccacttctacaattttatcaaaatcatatagtggatcaagacaagtaactgtatgtccatattctatcatagcagaagttatcaattctgcactctgaagggatacttcacgctcggaagaccaacctcctgccaataagagtatattcatatagaggtaac

SEQ ID NO: 5716 - DNA, 200 bp, Lawsonia intracellularis
tccaactgcgttgaaagaacgcgttctatatttttaagatgttcccaacttctataaatagctttacgggaatcttctgttttaccataacgaagtattaagtctgtgtaacgattttcaagagatacaggaatattatgttgcactctcttatctgaatacataacaataaataatggatgtattaaacattttggtaa

SEQ ID NO: 5717 - DNA, 200 bp, Lawsonia intracellularis
gctccatttccactctacatgatttaaaacaacttggccaagcctatagtttcctgtagaagatattacccatgaagctcctagctgagcatgactacctccatagtgcactgtataactttttgcaatatcatgaagaagccctccagctctacaactttttatatagtttgtatagccaacctttacagcttgcttgg

SEQ ID NO: 5718 - DNA, 200 bp, Lawsonia intracellularis
ctaatgcttctgcaaaatttgcaactactacactatgttgtctgatattatcaaatacaccatatttatcccataatgttatacagtctttatcacttggaacaaaatttgagtctatatcatagtaaagcgtaggtatgacattagagtttatcatatattttagattttcaacagtttgacacaacagtttgaggaat

SEQ ID NO: 5719 - DNA, 200 bp, Lawsonia intracellularis
aaatatttaatgaagtatttgagaaacagcagtaacgattttatagccgtacgattttcagtagattacgatgctatgctgtcaaataaccctttctaactacaagtgtcaatttaataataataataataataattattattattattattattaagaatatgattataattccgtaggatgcaccgctctaaattgta

SEQ ID NO: 5720 - DNA, 200 bp, Lawsonia intracellularis
ctcatttgtttttattaactcttccataaccaaattagtagctagtcgtttttctatgactttttcaaatcgtaaaatattacaaagatgactttctatatatttcctattaaatattaaacagatatattttatctgttgtggatacttgatgagaaatccttttcccaataaaaagggatatcatccctccataataa

SEQ ID NO: 5721 - DNA, 200 bp, Lawsonia intracellularis
tattttgaaaactcaatacaggtttttattatttcacagcctatcggccataaataattagccaactcaacgtcattactattaaccgaaagtttacattaaccactatctaatgagacctattttcaaatgttttattaataaatatagatagttatgctttcccaatactctttatgccaataaagtttttcctgtat

SEQ ID NO: 5722 - DNA, 200 bp, Lawsonia intracellularis
gtatatctccaggaatcaatatggccatagtttataattcttttctcattatgtaatttttgaaaaaaaccccttgcttttcaacttcttgaagtctaattatcttatatccccaattttcaaagaaggacttagccgtaattgaagcataaacaatgatacattttgttccaacttcgttttccagccgattgcatagt

SEQ ID NO: 5723 - DNA, 200 bp, Lawsonia intracellularis
gctgttgctacacctctaccttgaaaatctttatgaacaaataatctgtctaaatatcctgtttcatcaatgtctccaaaacctataatcaaatctttttcaattgcagcataagtaagatgtttcagaaatgaagtatcccatttcttaaaattaatattccctgttgcccatacatttaattgttgctcagtataatc

SEQ ID NO: 5724 - DNA, 200 bp, Lawsonia intracellularis
ttttatattcacagcatggactgtttcataaaacaatcgtgttatttgttctaaatcaatagatttatattgtctgattttcatatttcaaagttacaaaaagcaaattaagatacaaagtaaaaaggtattatttttatcctaatatgactccaataatttttaggaagtcaaaataaacctaaaagattcctgtaact

SEQ ID NO: 5725 - DNA, 200 bp, Lawsonia intracellularis
aactataaaactttacttcaacttagttaataaagacaacactaatttattattatatagtactaataaattaataataagtagctagaaaaaggaaaataaataaaattaaacttgttatatatttttaattaatatcttttgaaacaaaagataaaaaacacataacgtaataatgtaatttataagtaataaaatag

SEQ ID NO: 5726 - DNA, 200 bp, Lawsonia intracellularis
taaaagataatctattcaatcaaaaaactaaaaaaattatagctagtagcctcattcaagcaataccttcaattactgaaaaagtattatattatctctaataatttgtactaacaaaaaaggagggtggtgactccctcctctaaaaaactacttaatataatcctacaagggaaaaaatatttctatatcactaaaaa

SEQ ID NO: 5727 - DNA, 200 bp, Lawsonia intracellularis
gtagttatatagaaaaacttccacctgttgaagatgatgaactatgaggttcaagacgatatcccatttctaaagccatcttttctaaaggtgacacattccctgttgtcttcataatatgtaataaagtctctgctcctaattttgctcctgtgtcataaggatttacttcacgtaataaggttgaataaggcttacca

SEQ ID NO: 5728 - DNA, 200 bp, Lawsonia intracellularis
actgcttgtgcaattgcttttgctccaagaggactttctaatacaagatcatgaactgcactaataagatcgttaggcatgactcttctcctaaactacaagtttacatttccaagattactagaaactttcataaccacatacccataaagtcattaaaattattaatacaaaaaaattaatttacattacactccatg

SEQ ID NO: 5729 - DNA, 200 bp, Lawsonia intracellularis
cattggagtttaaactttcatccttcattttttgttagtgttataatggagcaaaaaaaatgactaatgtaaggagtattataagggtagcaacttacaagatcataatacccatatttataccccccccctataatggatctaataaaaaacataactccctaaaataaatattgtatcaatacaattaatacatataa

SEQ ID NO: 5730 - DNA, 200 bp, Lawsonia intracellularis
aaaaatactacttcctattataacttttgatctctcataataacataataacattacatagttattacactttaataattttataccttgttttgactataaactattagtgtatactttatgttagtatcattaaaaataaaataattcattaacaatgaattataatatatcaaaaaaatttctttttttatataaat

SEQ ID NO: 5731 - DNA, 200 bp, Lawsonia intracellularis
gtcaactataaaaattagttaccatctatataataacaacatacaaaaaaaaaaaaattacaaaaaattatgattgtactgtaaattattagacgctataatagttatactatattaatactattaatttaatagtattaatatagtataactattaataaagaaatatttagtctattaatataatagaaactagtttt

SEQ ID NO: 5732 - DNA, 200 bp, Lawsonia intracellularis
ttatgattataagaagggataatttagaaaggactataacaaacaaatattataaggatggctatttcatacctatggcttgaccaagtttccttgcaacttttttcactttttctattggacgaccttctgtaattgcctgaaattccattaaaagttcttgttgtctctctgttaactttgttggagtaacaacagat

SEQ ID NO: 5733 - DNA, 200 bp, Lawsonia intracellularis
atctttacaagtaaatcaccatgacgtttctgccccacataagggagtcccttatttggaatgcgtaacacagaaccactctgagttcctttaggcacttttaattctaatgtttcatcatctagaccaggaatacttaatgtacaacctagtgaggcctgtggaaaagaaatatcacaatagtaaaaaagatcttgtcc

SEQ ID NO: 5734 - DNA, 200 bp, Lawsonia intracellularis
ttgccgttgataaattttgctatcttcgacagtaactgcaatatgtaaatctccagatggtccaccatgtgtaccaggctctccctctccacgtaacctcaaacgtgttccactagctatccctgcagggatatgtacagttagttctttagactgttgtgtaacccctttccctttacatcgaggacacaaatggggga

SEQ ID NO: 5735 - DNA, 200 bp, Lawsonia intracellularis
tggtagatccttcaccatgacaaactggacaaggaataataaactgaaaaaatccttgagaattacggacctgcccagaaccattacattccttacaagtttctggtaaagttcctggtgcagcacctgaacctccacaatcctcacaagaaacatcttttgggatagttatagaaatgtcagaaccttttacagcttgc

SEQ ID NO: 5736 - DNA, 200 bp, Lawsonia intracellularis
tcaaaagacactgtaagtttatacaataaatcagaacctgctgttgctctaggtgtattttttctacggcttccacccatcgaaaaaccaaaaaaatcaccaaatatatcaccaaaatgagaaaaaatatcctctgcagaagaaaagccactaaagcttccacctaagcctgcagctccaaactgatcatatcttgcacg

SEQ ID NO: 5737 - DNA, 200 bp, Lawsonia intracellularis
ctgttcaggatcacgcagcacttcataaacttctgcagcctccttaaagcgttgctctgcttctggattgtttggattatgatctggatgattttgtagggctaattttctataggcttttttaatctcttcttgagaagcattacgagagacacctagtacttcataataatcacgatgaaccataatatttattaact

SEQ ID NO: 5738 - DNA, 200 bp, Lawsonia intracellularis
aactaaataaaatgttaaatattaatcaatagggctataataactcatatcttcagggaaaattttaccagaagcaatttcacgcaatgctgttacaatttctttattacgagagggaactaatgattcatagccttcacgatattgatgtacacgttttattgtcatctgaacaagcaaaaatctattcccaacacgtt

SEQ ID NO: 5739 - DNA, 200 bp, Lawsonia intracellularis
tctggcaatcttccactgtaatacgtgccattcaaccctccaacaataatgaataaaagctatctatagcttgattagctttatttaaaaagaaaaaaaaaaaaaataattctcatcactcataatgtcaactggatattttctatagattattatcattatatcaaaaagttatataataacaacaatcatattctatt

SEQ ID NO: 5740 - DNA, 200 bp, Lawsonia intracellularis
ttagctatagtccataacaaattcaataagtgttctaacagaaaaacctgttccaccagtaggacatagatccttttttttagaagtaaagctagggccagcaatatctaaatgtgcccactttgtatcttcttttacaaattgctttaaaaatactgcagcagttgaagctcctccttctctacctccaacatttttaa

SEQ ID NO: 5741 - DNA, 200 bp, Lawsonia intracellularis
aatcggcaaagtcactcttaagactttcaaaaaatctatcatcaagaggtaaagaccaatacgattctccaactaactcaccaatattacgaattttatttacaagctctatctcatcacaaaaaacccctgcgatatcgtctccaagagccacaacacatgcacctgttagtgttgcaatatcaataagaacagctgga

SEQ ID NO: 5742 - DNA, 200 bp, Lawsonia intracellularis
gtccaatgtttttgtgcatatgtcatagcatcacataatactaatcttccttcagcatctgtattaacaatctcaacagtcttatggcttaatgtgacaactacatcgccaggacgagtagcttttccatcaggcatgttttctgcgcatgcaagtagccctataactttaacttgtggtttaagttgacccaatgcctc

SEQ ID NO: 5743 - DNA, 200 bp, Lawsonia intracellularis
aaataatccaagtatagcaccagcaccagacatatcacacttcatttcttccattttagctgaaggcttaatagaaataccacctgtgtcaaaagttatacctttacccacaaaaacaagaggatcatcattttcatgccctaatggtgcatactccaaaataataaactgaggttcctgggaagagccttcagccacag

SEQ ID NO: 5744 - DNA, 200 bp, Lawsonia intracellularis
atgcaaaagcacccatacccgcagaaataatacttgctcgatccattacttcacacttcatattatattttttagcaatctcaatagactttttagacatctggataggtgtcattatattagcaggagtattatcaagagtacgtgctaaattaacggcagttgcatgaacttcacctcttctggcagcattacaaata

SEQ ID NO: 5745 - DNA, 200 bp, Lawsonia intracellularis
gtttcatcagcaacagtatcacgaaaaagtaccccaatccattgtgggtcctctggaagctctttaagatcctcttgagatttacagtcaacaaatctatatagtgctagtccaatagcacaaatgacttcttcaattattctttcaagattataatcaaagcgttcaaatgatcttacaagaatagaaaaattctttaa

SEQ ID NO: 5746 - DNA, 200 bp, Lawsonia intracellularis
tcctaactccctacaataactacttgctttaccaatagtattccttaagttctcaagaagtttaattggggtaatttttttacgctttccaagtcctacgataacaactcttgggatagttgttgaaagtggaccatataccactaccacctctccttttttcccttttacatcttctaatgctggagcaacttctaacc

SEQ ID NO: 5747 - DNA, 200 bp, Lawsonia intracellularis
atggaagtacattaagtaattcagcataagcctctttaaaaatttcatcttcaaaaaaaggtataataatagcatctgttgaccagctagatactccaatctgaaaacgtacttccataaaggtctccttatacaaaaaataaagtcaaaatagatcactcagacagataaataccatagctttttagctttctatataa

SEQ ID NO: 5748 - DNA, 200 bp, Lawsonia intracellularis
ataacttctttcaagtccaatagcttctgctaatcgggtaatatttccttgataagcatgtaatttttcagttaaaaattttgtttcaaaagctattttagcctgtttaaaatctatatctgaagaagttataatggaagaaatttcttgagaaatattaaattgctttttactaggatcaatacttcttttagtatgca

SEQ ID NO: 5749 - DNA, 200 bp, Lawsonia intracellularis
tttcctgaggtagatctgtcaaacatactttcttccctgaataaagaataaccattcgttctacaaaattaagtaattctcttacattccctggccaacaatattgtttcaatacagggaagacctcatctaaaaaaataggcggctcacgtctataacgtttactcaactgaatcacaaacctatttaataatagctca

SEQ ID NO: 5750 - DNA, 200 bp, Lawsonia intracellularis
atatcagaatcacgttcacgaagagggggaagatgcaatggaacaactcgtaagcgataatacaaatcttgacgaaatgttccatcgctaatagcgtcttcaagattcttatttgttgctgcaataactcttacatcaactttaatagttctaacactaccaattttttcaaaacattgttcttgcaaaatacgcaaaat

SEQ ID NO: 5751 - DNA, 200 bp, Lawsonia intracellularis
ttttgcttgtgtttttaaactcatatctcctatttcatcaagaaataatgttcctttatgtgccaactcaaaacgacctgcacgagaagcatcggcaccagtaaaggcccctttttcatgaccaaatagttcgctttcaatcaattcttcagggatagcagcacaattaacagctataaatggtttttgatatcgtgagc

SEQ ID NO: 5752 - DNA, 200 bp, Lawsonia intracellularis
ttcctttgtgcaatgcttgtgcagctaactctttacctgtaccattctctcctgtaagtagtacccaagcatctgttggagcgacctgtgataataaacttttaaattttaagataacaggagactgtcctataaactcactctcctcaggtaatacagtacgtagtaatttgttttcccttcttaatcttactgtttct

SEQ ID NO: 5753 - DNA, 200 bp, Lawsonia intracellularis
atagctctattagctgtaataaggactttttccaaagaaagaggcttttcaataaaatcataagcaccttgacggatagctgttacagcagtttcaattgtggcatgacctgaaatcataataacaggtaattcctgatgaagagcctgaatatggtctaaagccataagaccatccatcccaggaagccaaatatcaag

SEQ ID NO: 5754 - DNA, 200 bp, Lawsonia intracellularis
aaaaacaagatctggagactctacatcaacacacttaagtccttcttctgctgaagctctttctaaaacttcatggccctcatcttcaaaaattcctttcaatgaaaatctaatagagtcttcatcatctataataagtatacgtgctgacatgattactagcccctaacctatactgctttatatatgttagaattaat

SEQ ID NO: 5755 - DNA, 200 bp, Lawsonia intracellularis
atatctaaataacaaaaaactaactagttaaaattatactaataaaaatttttataataagaatatcaaaataatcgtcttactatcttatataatataactagttatattttgctgttgactatagctattaaataatacatagctgttactctttaaataaaaaacaataaaacttcttgaccagatctatctctcag

SEQ ID NO: 5756 - DNA, 200 bp, Lawsonia intracellularis
cttcattatactagttatgcaaaaagtatgttatttttttcttataacctttttctactttttcataacagaaaattatctctttgctacatcaattaccacttccacaattaaccaacaacatatagcatatacagttacttttacctctccagaaaatcctaatcttgcaacagagatggaaacacatagtgaattag

SEQ ID NO: 5757 - DNA, 200 bp, Lawsonia intracellularis
taaagcttgcaaatcaatctttagatagtaaaataggtttaaatttacgtgttaaagaagatataagtacagcacaaaaaattcttgactcgaatggttattatagtggaagtgtcgagggaaagattgactggcagacgaaccctattagtatccaaatccaatttaaaccaaatgtacaatataaaataaatacaata

SEQ ID NO: 5758 - DNA, 200 bp, Lawsonia intracellularis
catatccaataccttgatagtgaacttgcatatctccctctttccttagaagaattcaatctctctaaaggtaatcctgctcttgctgttaatatcctatcctctgtaagtagcctcatgcaatatatacataataatggatatccattagccaaaataaaaaaaactcaatacataattaatcggatggattatacatt

SEQ ID NO: 5759 - DNA, 200 bp, Lawsonia intracellularis
tgatattgatttagtaataagacaaggaccgttactccatatgggtaaagtacaacctcaacataatctcaatatttcaacaatattcctaaataaaattgctacatggaaggaaggaagggtatggaacaatgcactccttgattcttatcgaacacggcttcaacaaacaggccttttcagttctataactctcaatc

SEQ ID NO: 5760 - DNA, 200 bp, Lawsonia intracellularis
caaggaatcaaaaagaacaaaatggtaacacctctatagaacttgttgcaacagaagcccctccaaggactattagtggtggcttacaatactcttctgatcaaggtattggtgcacgtgggacttgggaacatcgaaatgtttttggtaatggagaactttttcgtataacagcaccaataagtcgagatgatcaaaaa

SEQ ID NO: 5761 - DNA, 200 bp, Lawsonia intracellularis
attatggcaaacttccaaaaaccagcctttggccgtccaaatcaatcattaattagtgaagcacaacttaaaaaagaaaatacaaaaagttacaaacaacaacttgcatctattgctttaggaattgaacgacaatttaatagacgttggtttggtagtagcagtctttcagttgatacaggatttatggatgatcgaga

SEQ ID NO: 5762 - DNA, 200 bp, Lawsonia intracellularis
ttctataaaaaaaatatttactctttttggcatccccttatcaataacaagggatagttctaaagatcctcttaatcctatccaaggaacaaaagctaccttaaatgttactccttatattggtaaatataaaaaaaagattttgactttacgtagtcggtttgattttagcttttacatagacgttcttaaaacaggga

SEQ ID NO: 5763 - DNA, 200 bp, Lawsonia intracellularis
aacttatcttggctaacaaaatagcaataggttccctcctagggaaagatatagaaaactatcctgcaatactaaggttttatgctgggggtggtggtagtgtaagagggtatgactatcaatcattgggaccaaaaaataaatatggggatgctattggaggactttctttttcaactattagttttgagttacgatta

SEQ ID NO: 5764 - DNA, 200 bp, Lawsonia intracellularis
aaaataacagaatccattggcattgtgccatttattgatggaggaaatatttacgaaaaaaaatttcctgactttaaaaaatcaatatattggggggtaggccttgggctacgatattatacaagttttgcccccatacgtttagatatagcaactccacttcaagatagaagccataataaacactttcaactttatat

SEQ ID NO: 5765 - DNA, 200 bp, Lawsonia intracellularis
tagtattgggcaagcattctaatgaataacacaaaaatactttctaagttactctataccctcttaggagcatttacgttatttttaggacttattattacaggcattctttttatacggacctctacaggcattgcttggattaaaaatacagtttcttctttacttcaacaacaaggaattatactacaagtatcttc

SEQ ID NO: 5766 - DNA, 200 bp, Lawsonia intracellularis
aattattggaccattcccagaacaaattactattaatgaacttagccttagtgatgtgaatggaacttaccttacaatatctaacttagaaatccaatcaaacttatgggctttattcaaaggtcaacttgaaattctgtcttttgaacttaatgatcttgtattatatcgcttaccctcaaataataatctaaaaaaat

SEQ ID NO: 5767 - DNA, 200 bp, Lawsonia intracellularis
catctacaagttttgtgttacctcacatatcatttgatttaactccatggtggactgaacatattcgtattcaaaacatccatattaacaatacacaactttcctctgatattataggtattccattggtattatcccttgagggtgatggtacattaacaaattggaatggaacatttcaactatcctcttctaacaaa

SEQ ID NO: 5768 - DNA, 200 bp, Lawsonia intracellularis
acaaaaattataggaacgcttcgttaccaagggaataagacacaattttttgaatatgttcatcctacacggatagtaacactagagatagacagcgtagctgataaaaagtcatataataatagtatccttgaacaacctctacatttacacctttctatttatcctgaacataatagaattatcttacactcattact

SEQ ID NO: 5769 - DNA, 200 bp, Lawsonia intracellularis
agctgaatatggtagctggttacttacatcagaaagtattgaagtatctaatgagcaattaaaaggaaatattttattaaaatataatggagaagctactcatcaacttcctataaaaaaacttaactcatcaattaccctcagtggctcactaaataaacctaattttagtatacaaatgacattacctgaaattaaca

SEQ ID NO: 5770 - DNA, 200 bp, Lawsonia intracellularis
ttacaaaaaacataatagatcttcaaacagaacttgttattaatctaggacttttctctactcactctgatattcttacatctgggacaattacagtacagggagaaactatacccaatagtattctttccagtgcagttgatataatagcctctacaacaacacatacaattaccttagagcatgcaaccttaacatct

SEQ ID NO: 5771 - DNA, 200 bp, Lawsonia intracellularis
ccagaaatgcatttttccctatctggagaatttaatagtcttctaggaaatatcgatgcaaacctaaaaggtaatactccaactcttagtatattttcttctcttcttggactacctgatcttactgggcaaagtaacattactataggattacaccgtcaagggtcttcctcttcaatagaaggaacagcaactgtctc

SEQ ID NO: 5772 - DNA, 200 bp, Lawsonia intracellularis
acttaataatatgaactggggagtacaagcattacaggggacattaggtgataatgcaactctaagtggaatatataatttaactcccatagactggtctatttctttaaacaaattgaaattaacagcaaagaatgtttatgctgaaggccttattaattttcaaaaaaaatacatagatagctctataaatcttataa

SEQ ID NO: 5773 - DNA, 200 bp, Lawsonia intracellularis
ttcctaaccttcagctaatagctcctcctatatctggagagttacaatccttaattacagtgtctggaaaacttgacgcaccttctatagaaagcaaaattttttcatcacaactcacctggaatgcgctccaacttaataatcctcaactcataataactactactcaatcttcttcctctgcgattaaaggtaatata

SEQ ID NO: 5774 - DNA, 200 bp, Lawsonia intracellularis
acactctcggctgagccagcttcatctgaggcattaaccttttcaagtaattggggaatcctacctacggaaatactagtagaaaaaattataggaaatatattaggagtaaatcttgatggtaatattaaaataacaaaaaaagattaccttataaatggtgatattattgcagaagttcagtcttggaaagatattgc

SEQ ID NO: 5775 - DNA, 200 bp, Lawsonia intracellularis
aaacatattgcaaatacctattagaggttcagcatcaataaaaatacagtttgatccaaagaatcaacaatgtatttctactcaatggcaattaaaaaatttcatattaggtaataattttaatgtaactactataaaaggaagagcagatacaatacaacttcataagaatcctacaattgctctctcttcaaaaattg

SEQ ID NO: 5776 - DNA, 200 bp, Lawsonia intracellularis
gtgctggtacatatgaagactttcaatggacacaagggacgttagacataaaaggcacattaaaaaattttaatagtaaaataaatatagcaggacaaacaactgtaaacgcaaactttcaaacaaatctttttgaaaaaaatattaatataactactcttaatttaaaaaatattcaaaaaaatataggaattaagctc

SEQ ID NO: 5777 - DNA, 200 bp, Lawsonia intracellularis
cttcagccaataaaaattatagtctcacctcaacaatttgttcttaataactgttcactagcaattcttccatctggaacaattacaactgatatatatgttactcctcaacgacttaatgctaatgcaatcattaaagaagtttcacttctctctttccaaccatttagtatacttcttcctcaaggaaatataaatgg

SEQ ID NO: 5778 - DNA, 200 bp, Lawsonia intracellularis
acacataacacttacaggaatacctagtaaacctaaaggaacactctcatttgatattctaaacatacattatccaaggccaaatccatcaatagcaaacttacatgtagaaggggaaattatatcttctcctaacaatatatgtaaacttaatgcaaccctaacagaaaaaaaagagcctatacctatatcaatacaag

SEQ ID NO: 5779 - DNA, 200 bp, Lawsonia intracellularis
caacactcccttttgagttcacagaaaacaatatccctatgctatctaaaatgaggcctttttctgcccatatcaagtggactggaatattagatacactttggaaactcattccacttactgattacattatggctgggaatggatctttagatgcttctctttctgggactttagatagtccaacatatgcaattata

SEQ ID NO: 5780 - DNA, 200 bp, Lawsonia intracellularis
acaacactttctaatgctaactttcaagatctctcccttggtctttacttagaaaatatcaatgctaaattacaggtcttttctaatagaatctcccatattcaagctacagcatctgatggtaaacaaggtagtatacaacttattggtaatattggctcatctaaagaacactttcctttgtctattaatggctcctt

SEQ ID NO: 5781 - DNA, 200 bp, Lawsonia intracellularis
tacaaaccttgctccattacaacgtaaagacctaagtcttacactttcaggagcagctactcttgaaggaacattaaaacagtctgaagttaaaggcgatattgttattaaccaaggcgaatttcaacttactgaagggttaaccagtaatattccaactcttaatgtagttgatagcactcaacaacaaaatacaaaga

SEQ ID NO: 5782 - DNA, 200 bp, Lawsonia intracellularis
ccaaaaaagctacctatcaacaacctaccttatctattgcgttaagtatcccgaatcgtttttttgtccgtagtagtatgtttgaaagtgagtggggagggaacctaactattaacaaagtcataacaagtcctgttattacaggagcactaacttctataagaggaaattttaatttactaggaaaacaattttctctt

SEQ ID NO: 5783 - DNA, 200 bp, Lawsonia intracellularis
gctaaaagtacaatatcattttcaggatcagttccaccaaacccactactcaatatttctttaacatattcatcaccttctattacagctataggcattattaaaggtacaactagtaatcctaatattactttttcaagtacaccacctttacctcaagatgaaatagtttcccaagttctttttggtaaaagctcaca

SEQ ID NO: 5784 - DNA, 200 bp, Lawsonia intracellularis
aagtcttagcaggatacaagccatacaacttgctcaagaattagcaaacttaacaggatttaatactggaagtatgaatttcctaacaaatattcgacagacattagggttagatatacttagcttagggacaacttctaatagaaaagccaatacatccaactcaaacgatcaaatagaagatatccctgttatagaac

SEQ ID NO: 5785 - DNA, 200 bp, Lawsonia intracellularis
taggtaaatatattacagacactgtttatgttggtgttgaacaaagttatttagatagtaatgatactggggcaagaatatcagttgaacttgcacctaattttaatcttgaaggtagaacagggactcaatatagtgagataggtattaattggaaaaaagattattaatggcttattttttatatctaaaaaggatat

SEQ ID NO: 5786 - DNA, 200 bp, Lawsonia intracellularis
tttgttattaatacaaaatatcctttttaacaaaattatttccctcttccacttttcaatggagtcattggagctccagaatcaggttccatattattatatccacccataccatagtatcccataccatgacgatgcatcaacccgctaccataaatatagtggccacgaatgcctacttcactagataacttctcata

SEQ ID NO: 5787 - DNA, 200 bp, Lawsonia intracellularis
cattttttcatattcagatgataattctgtatgcattttagcaatttcacgagagagctcttgaatcactgaacgatcaggtttgctactttgtgccatagcttgcaactctagacgttttgctaaaatcttttctcttaattcctgggtctttttagcaaactctttaacaatggtatcacatttagtttgcatctcag

SEQ ID NO: 5788 - DNA, 200 bp, Lawsonia intracellularis
gtgttaaatattgataaacaccactaccactttttccattattatccccccctggacaaggagaaagcctttttgcgtcaactaatgtagtattaatacatattaatcctaccataacaaacataataaaatatttttttaaaatgccattcattaaccaacctccatagattaaacttcaatagatttactactcaccc

SEQ ID NO: 5789 - DNA, 200 bp, Lawsonia intracellularis
ttatcttcattaactcatcttttaacatttaacattaaaaattcactataattacagtacatattagatcaaactataataattatataatcatcaatgacaaaaatttgtctcttgttaagagcttactaaagttaacacagctatgcaactagttgtaactaaataatcttttatcttctaataataacaagacattc

SEQ ID NO: 5790 - DNA, 200 bp, Lawsonia intracellularis
caattaagatattatatatagattataaatatagtaggacctcagctaagctgaggtcctactatatttataattttctggtcggagcgactggattcgaaccagcggccccctggtcccaaaccaggtgcgctaccaaactgcgccacactccgctattttattatatctattacaccacaaaataggtaacatcacaa

SEQ ID NO: 5791 - DNA, 200 bp, Lawsonia intracellularis
taaatcaaaattacttggcaataatacgaaaatcatcacgacgattttttgcccatacagctggccctgttccttcaacagctggacgctctttcccaaaacttattatctcaagctgagatggatttactccaagcatgactaaatattcatatgctgcacgtgcacgacgctctccaagtgctaaattatactcttga

SEQ ID NO: 5792 - DNA, 200 bp, Lawsonia intracellularis
gtaccacgagcgtcacaattaccttctatacggacacgaatacaaggatattcttttaaaagttcagctttcttctgcaacatatcacgatattcaggtttaatatcatatttatcaaaatcaaaataaataatcccatcagttatagtttctgcagctgcattaattgctggtgctggagcaatacactccgttgctaa

SEQ ID NO: 5793 - DNA, 200 bp, Lawsonia intracellularis
agattgttctacatcaacactctttttacaacaaccaaaacctgcacttaatactactaacagaaccagaactatgccataacgtctaaatacttccatttcctttcctcctaagtctcttcacacactgtgtttccccagccatcgattaacacaccactagttaattctaatatttttttactttaacaaaatttact

SEQ ID NO: 5794 - DNA, 200 bp, Lawsonia intracellularis
tatttattatacataaatatattctagctggactaatataatagctatctagctttatttgcaactgttattttcccccaacgtgggaacgatgcatcgccatgtcctgtagggatttgctttgcatctccaccatgacgtgttatcaaataaatctgctttttaccactacgtgttgatgtaaaagcaataaaatagct

SEQ ID NO: 5795 - DNA, 200 bp, Lawsonia intracellularis
atcaggagcaaaagatggttgctcatcattaccagggccaaaagtaacttgtctctcaattcctgtcagcaaatcttgtacaaaaatacgattaccatcatctgtcaatcgagaaaatgcgatgagtgtcccatcaggactcatagtaggctctgtattataacaaccttgacggctaacacgactaacttgtcctgaag

SEQ ID NO: 5796 - DNA, 200 bp, Lawsonia intracellularis
aaaaatctttcataaaaatttgtggattacttagcctattagaacaaaatgccatttttgttcctttagcatcaaatgatggagaaacatttatagcagggctttcctctagcactttctctttttgaaaagtatgatccaataaaaaaatatctggatacttaccagtagaaaggctaactgctactttattgtctggc

SEQ ID NO: 5797 - DNA, 200 bp, Lawsonia intracellularis
ataaacacaggtcctataaccgtattcccagggaaacgaattctctggattttatttgttaacctatcccaaacacctagagcatgtgatcgatcgtctaaatgtgtaaagacaataaaccttccatctatagaccatgaaggtgacattgccgttcctgaaatatctgttatctgacgtaattctttccctgttggttt

SEQ ID NO: 5798 - DNA, 200 bp, Lawsonia intracellularis
aactagccacacatctcttacattcttcccattaccttgtttcacaaaggctaatgtagaaagaaaaaaatccccactaccggttaaagtcttcataagatctgcgcaaaacttatctgctatattagaaatttcacttttaacaacaccactatatgctgtaccaaaaacaaacttgccagaatatgtttcatataatc

SEQ ID NO: 5799 - DNA, 200 bp, Lawsonia intracellularis
ttaattcaacactagagtcagaatgatctccctttggccaaccaacagttataagtaaatcggaacctgccaattgaaaacgtttaaaatctatatttggcggctgataaccctctagcgaacttccatttaaaattgccttttcatcagtaagcctcataaatggaagataacttagattattacgaatagctctatca

SEQ ID NO: 5800 - DNA, 200 bp, Lawsonia intracellularis
agatcaatgccaagatctgttgcaaggactcctggggagataattggtctagccatagctacatgtacaatattttgaccaggaccataaatatctatctgcatagctgataaggctggatgacataagcatactaataataaaattatcaatattcctaatgatctgtaagtgttacctctactcataataataaacac

SEQ ID NO: 5801 - DNA, 200 bp, Lawsonia intracellularis
caataaaaattatatagttaggtatagttagtaaaaatagtcagtatttaacttagggtactaatttatttatcctctaacacaaaaaatcattttaagtgattactctctctattatcagtttacaatatcggctactaatcccttattatctatcaaaaattagatttcctcgaaaagactaaaaatatttcttaata

SEQ ID NO: 5802 - DNA, 200 bp, Lawsonia intracellularis
aaattatcatatctatagatgaagtagcaacatgttagttcactttctacataaaaagctatctatataacaaaaaacgttagagaaagagtaaaataattctattttaaaatatctataacaaattataactattataatattacttttttaagagccaaatatccttaactcaaattaacctaaaaaatattttctta

SEQ ID NO: 5803 - DNA, 200 bp, Lawsonia intracellularis
attaacaagatattacaataagtaaaatttttaagttgtctaacctgttacaacatacggaaagtattactgaacttctagcgagttaaaaacaataatcatatcttgctgtgcaggtgttggtggtggtggtaatatttttgtcctaattaccgcatttacagcagaagcatcaaaatctgatctaccagaactacgct

SEQ ID NO: 5804 - DNA, 200 bp, Lawsonia intracellularis
caattacacaggaaagaacattaccatctgcatcaatacgtacatggactagtgcaactaaattatcacgagaatacgttgggatactccagtttggtcgaacagacatcattactaatccagcataaatatcatgtaatccaccacctccaccattaccatcacttactccacctccaccaccgactgtagaagtttgt

SEQ ID NO: 5805 - DNA, 200 bp, Lawsonia intracellularis
tttttaaacccagctaacgcattagttacagaagtattaggagaaactttttgtgatttttgaatatttgtctttttctttgcatctaataatgcatcttttaaagaagcactccctcctattggttctgtcttctttactatttttttagctggttctccttttggttgcattttttcaacttttttagctaattcttg

SEQ ID NO: 5806 - DNA, 200 bp, Lawsonia intracellularis
ttttgcctttggagtatctaaaattttttctgtaggaattttttgctctatcctttcattaactgctatctcttcccttacaggaactgcaattggttgaagttggttttgagactcatgaccacctattgtttcttgtctaagaggtacaaaatcagaactagtctgaacagaaggattctttagaactggaatatttt

SEQ ID NO: 5807 - DNA, 200 bp, Lawsonia intracellularis
ctattgggatagaaggtgtaactgttgaagttttagtaggaacagggatctgctgtcctaatacaggagagggtagtctaccacctcctatagactccatagttaagctaatctgaattggacgctcaggtcttacaatagtcttagtaggccaaaaaactataattaagatcaacccaatatgtagaatgagtgatgcg

SEQ ID NO: 5808 - DNA, 200 bp, Lawsonia intracellularis
atataactaataaatcgcataattctatttacctttcacctatgacacaaaaatacatctattcaataaatgaataataacataaaaattttgtccttgaccatagtaatcaaaatatcattactttttagaggttaccccagagccaatctcttccctagtcgcaatcataccaagtttatcaatacctgcctcacgaa

SEQ ID NO: 5809 - DNA, 200 bp, Lawsonia intracellularis
ctctccccattacctctacaacaacgccataaggtatttctttatccgcctgtaacaaaagctctttattttgagacctcactaaaagatctaatttttcttggagttcatccatagaaacaggataggtatcaaggtacatgttaccatctctacggatggttaaaataagattttctgactctagtggtagtgtttct

SEQ ID NO: 5810 - DNA, 200 bp, Lawsonia intracellularis
acagctctagtttgaggaagatctacttctaatccttcagtcatcataggtgctgtcaccataaaaatgataagtaaaactaacataacgtctacaaatggcgtcacattaatctcagaaacaaaactacttttcccccctaaagatgcccccataattccaccaaaaactttctctattttttctactaattaagtatg

SEQ ID NO: 5811 - DNA, 200 bp, Lawsonia intracellularis
aatgtataagtctaaataaattatccttaacctatctttatgtcttatttgcattaagctcacgatggacacgattaagaaacattcctgcaaaattaactaatttagattcaagatcccctaatttcccaacaaaaatattgtaaccaacagttgcaggaatagctacagcaagcccaaaggcagtagctattagtgct

SEQ ID NO: 5812 - DNA, 200 bp, Lawsonia intracellularis
tcagaaataccaggtgcaacagtagcaagagaagctgacttcatagcacctatagaatggaaagtatgcattataccccaaattgttccaaaaagtcctataaaaggagctgtatttgctgttgttgcaaggaaagaaagagagctagataatcgtgtcatttctgtacttactccctgacgtagtgctcgacggacatt

SEQ ID NO: 5813 - DNA, 200 bp, Lawsonia intracellularis
ttctacaataacctcctcagagttcccagcctcttttgaacgattaaattctgtcactccttcatgtgcaacgacatacaacggtgaaaccatgtctcttccaattgagtgcacagcatttcgtaattctctagcatcatgaaaacgctcactacctaacactgtttttttcatggctaacctaatagctatccacttct

SEQ ID NO: 5814 - DNA, 200 bp, Lawsonia intracellularis
ggaacatcattgcccaacttagtacactcatgagcaaaagaattagtagcacaacctgaccaacaactgttgcttgagcaattaaagaaattatactcaaatccattctattcaccttaacaagaaataataagcacagaaaatgttttcaatcttctttataactaatattaataccttcaatatctttaattataaga

SEQ ID NO: 5815 - DNA, 200 bp, Lawsonia intracellularis
acttatccttactaataaacatattagccttaaatttcgtacagatactactatgatacgtcaagctatatcataaagaagatacaataactagccatagctaataagttactgttactgtttttatagcatatatattactttttaattaagcaatgcctgttttttatagataaaaaacacacagagcctacaaggct

SEQ ID NO: 5816 - DNA, 200 bp, Lawsonia intracellularis
acttgacagatactttttaggacaatatttaataattcttaaatgctagctgactcatatctatctaatttaatatagtttctcagtttagcatatagaaggaatttatataataaaagttgtagttactcatactaccttaatttaattaatttttaactaagctatatctctctttatttttaacaaattaagtacta

SEQ ID NO: 5817 - DNA, 200 bp, Lawsonia intracellularis
taattagactatgtctcaaatattatctacaactattcttaattaaaaaaccttcttctaatcaaattagcagtctacatttttaattataaaattggctaaaataaaaatataaatactaacttaaaggaaatatttatgaaatctttaaagggcactagaacagaaaaaaatatccttactgcttttgctggtgaatc

SEQ ID NO: 5818 - DNA, 200 bp, Lawsonia intracellularis
ccaagcaagaaatcgatatgactacttttgtgtaactgcacgagaagaaggtttaatgcaaatatctgaaatatttgctgagactgcacttcaagagaaagctcatgctaaacgcctttttaaatttcttgaaggtggtgaagtagaaattcaagctgcatatcctgctggagttatttctactacagaaaataatctcc

SEQ ID NO: 5819 - DNA, 200 bp, Lawsonia intracellularis
tggctgcagcacatggggaacattatgaatcaacagaaatgtatcctcaatttgctcaaattgctgatcaagaaggtttttgtgaaattgcatgtgttatgcgtaacatagcagaagctgaagcataccatgaaaaacgttatcttgcctttgcaaaaaacctaaaagaaggtaaagtgtttgaacgtgaagttgctatt

SEQ ID NO: 5820 - DNA, 200 bp, Lawsonia intracellularis
tcctggcgttgtttaaaatgcggctatattcatcatgggaaaaatgcgccagaagtttgcccagcttgtggacatccaaaagcatactttgaagtcttacataacccatggtaatagagatccttttatgtcagaaagtccaatcatgacagagccaaaagaaatgtggcattgtcaaataacaaactgtggatatatct

SEQ ID NO: 5821 - DNA, 200 bp, Lawsonia intracellularis
ataatcctgaaagaggagataaaagagctaaaattccaccaggaacggaatttgaatcgctacctgataattggcattgtcctgtttgtggtgcttctaaaaaaagttttaagccactaacagatagttaacttacttataagtcaaggagagaaatttctctccttgacttatttttttaagaaatgcattcaattttt

SEQ ID NO: 5822 - DNA, 200 bp, Lawsonia intracellularis
ctagctaactaactaaaactttttttaataatttatgaaaaatattgctgtatggaatactgcttttcttggagacacagtacttactcttcctcttatccaaactcttgcaaaaacttacccagaagcctctattgatttctatgttcgtaaaggtaatggctctcttttctcttcacatccaaatattaaaaatatta

SEQ ID NO: 5823 - DNA, 200 bp, Lawsonia intracellularis
ttgaatataataaaaaacaacaattcataaaaagtacaataaaacttatccaacatataaaaaaacaaaactatgatctttggattaatgcacatacaagtattcgctcttctattattacactatgttcaaatgctaaactacgtataggttattctgaaaatatcatccaaccattatgttgtacacagctcattaaa

SEQ ID NO: 5824 - DNA, 200 bp, Lawsonia intracellularis
cgtaaacttggttctcttgatgagatagagcgtcttttagatcttctctcaaatttgcctataaaaaaatcaaatatccaatactggcctaatattgtcttaacccaagacgcacagcaacaagcaaataccttctggaggaaatatattttaggtcctgttttaggaattaatcctggttcagtatggcctacaaaacg

SEQ ID NO: 5825 - DNA, 200 bp, Lawsonia intracellularis
ttggttaccagaacgatttgcagctattttacatagagctataaaaaaaaatattcatgtactgctctttggaggaccaggagaggaacagcttgcaagtgaaattatttcattatctggtatgactggacaccccttactccataatctttgtggaacactcacgttacaagaattagctgcatttataaaaaaattga

SEQ ID NO: 5826 - DNA, 200 bp, Lawsonia intracellularis
attgctaccttactaatgattctggccccatgcatattgcatggagccaacatacgcctgttactgctatttttggccctaccgtaaaatgcctaggattttctcccagaggtgagcattcaactgtaatagaaatatctctttattgtcgaccctgtagtctacatggaggaaaaacttgtcctgaaaaacactttagg

SEQ ID NO: 5827 - DNA, 200 bp, Lawsonia intracellularis
tgtatgaaagatattactattgatgtcgtatgggaaaacatagaaaaaaaactcttcctataactataataaatgtaatgcctctaaatataacataaccaaaaattgcatggcaacctttttcttctttcctcctcttccttctattacagggggtatgtatgttatacttactattgcaaaacatttacatacaattg

SEQ ID NO: 5828 - DNA, 200 bp, Lawsonia intracellularis
gccataaaagtacattagtctttcgtgagtactcaccttatattgatagcattacacctcaaatccctactacacactgggacaaacttacacttagcaaagatgatgtttgggttgttcctgaaggttggccaatggctcttatcccaggactacgttctcaaagtcgttgtgttgtctatgtacaaaactgggcatat

SEQ ID NO: 5829 - DNA, 200 bp, Lawsonia intracellularis
ttacatgggaaacttccagacaatgcttcatgggaacaacttcctgtgacaatgatcgctgtttcaaatcctgtagctttctttataaaagaaacaacaggaataaatgctcatatattacgccctgggattaaccttaatatatttcatgtaccaacttgtaagtcttttaaatctcaaaacagacctatacgaattgc

SEQ ID NO: 5830 - DNA, 200 bp, Lawsonia intracellularis
ttggatgcctagaaaaaataaagcacttgcacatcaaatacaacaaagtattaaagcaaaactttctagttgtaactcatcaacttctttagagtggatagaaattcataaaaaaacaccagaagaagtttctgcctgccttaaaacttctgatatctttcttgctacaggatttcctgaaggatgcccattgcctccat

SEQ ID NO: 5831 - DNA, 200 bp, Lawsonia intracellularis
tagaagcactagcatgtggatgtcttgtagtaggatttggaggatttggaggatgggattatatgcgtcaagcactacctaatggttatacaccttggtggcccttagaaaatcttccatggggaggaaatggactatatgtagctgatgctgatatattaggaactatttttgccttagaatacgctatagatttacta

SEQ ID NO: 5832 - DNA, 200 bp, Lawsonia intracellularis
cactctcataatgaagaacttaactctatatatttgcaagctgaaaaaacagttaaagaatattcccttaataatcactataatgctgtctcaaatctttgggaacagcattttatataatttagtaactatttataagatattaacataatttatttaaatttttatagaaaaaactctggaattttatatcccagagt

SEQ ID NO: 5833 - DNA, 200 bp, Lawsonia intracellularis
tttatcgataccccttgctttaaattttaataatattctagctaactctaaaaatctctggaggagattaaattatatgtaatactttataataactacttatagttattactatgctgccaacataatatgattgaaaaattctctagcaacaatactagatgggttatattcaaggactgtttcaatttgttttatag

SEQ ID NO: 5834 - DNA, 200 bp, Lawsonia intracellularis
cttctttattacgacctaaagaaattaaacatccagcaagagaaatacgaagctcctctctatctgggaaaatatttacacactcttcaagaactgaaacaactgactcaaggcgatttaatttatagccttcacggacaaggcaattaagtgctactgcatttgcaggattagcatgtgctgctttttcaaaataagaa

SEQ ID NO: 5835 - DNA, 200 bp, Lawsonia intracellularis
aaggcttcttcatcttcgcctaattccatcttaataagacccataccagctaatgctttatcttgaagaccaaaatcaaaagccttattataaaagtccattgctgtatcaaagtctccacgttgtatagctatagtagcaagacccatataaggttcaggctgtgtttccatagaagtattagcttttttataataatc

SEQ ID NO: 5836 - DNA, 200 bp, Lawsonia intracellularis
ttcagccttatcaaaatcacccataaacaaatagcattcacctaactctttgttaatttcataatcaagctgattttggctactcataatctcctccatatcctttttactaaaagttatacttaactaaattaataagggtgtattgatataaaggataaagcaatgcacatgccaaaatatcttttttaagtaaattt

SEQ ID NO: 5837 - DNA, 200 bp, Lawsonia intracellularis
atagagttccatgtaatatagagcttatctataagatattgtcagtgatttgaccctatcatatcaaatatattaatagaattatcactggttacgtaatgactgcaatctctctgccaacatacgagcttttgcttcaccaatcccaggaatagcttctaaatcctttatggtagcacatgtcattgcttcaacagtct

SEQ ID NO: 5838 - DNA, 200 bp, Lawsonia intracellularis
taaaatgactccacaaaagttttgctgtggcttgtcctataccagggatacgtaataactcacctaacagagctgtattttttctagcttttctatgtttgccaagtacaaaattatgtgctgtatctctcacatattgcaaaaataataactctggagatccttcttttaaggtcagaggattcattcttcctacgaca

SEQ ID NO: 5839 - DNA, 200 bp, Lawsonia intracellularis
aaaattttatctccaatattccctgcacgacgatctactctaccttcttcattccttgctttagctattcctgctaatataaatacgtctttaagatgatgctcattaaaaacacgttgtacggcatttatttgaccctttcctccatcaataagaactaaatctgcccaaggagggcctgactgtattcttcgttttgc

SEQ ID NO: 5840 - DNA, 200 bp, Lawsonia intracellularis
ccatgatgcaagagcagcataatcatctcctttaataaaaggactattatcttctgttgtactatatattctataatcatttttaagaggttgagaatcttcaaaaacaaccattcctacacgagtatttgtcccacttatatgtgatacatcaacacattctattcgaaaaatgggtttatcagtatgaaaaacttttg

SEQ ID NO: 5841 - DNA, 200 bp, Lawsonia intracellularis
ctaatttagctgacataggctcccctaattttgtctgtacagcttcacgagcattagttactgcaatatctaccaaattactttcaattatatttttaggaacctcaatacgaactgtactattacgtatatcttctaatacatattttaatgtttcaaaggtatcttcacttatttcgtctttattatttgttgattca

SEQ ID NO: 5842 - DNA, 200 bp, Lawsonia intracellularis
ggaagccatgggacaataattcttggagggattgaagatataggactataaaattgacttaaaaaacttcctaaaagctcaggaccatcatcaagttcaagacctggccaaaaaaatgtccttccatctaacagttttccttctcgaacaaacaaaaaaccaagagctaacccattattaactaccgcaattccaataac

SEQ ID NO: 5843 - DNA, 200 bp, Lawsonia intracellularis
atccatatcacctccctcagggagaacaacactttgtctctctatagtatgcttaatagcttggatttgatctcttaaggttgctgccttttcaaactctaatgcttcagaagcatacaacatatctttctgtaataactctacaagttctttggatttcccagataaaaataactctactttttgtatcaatacagcat

SEQ ID NO: 5844 - DNA, 200 bp, Lawsonia intracellularis
agtctttagggtctacttcttctgtgcatggagcaagacattgttgtaaataaaaataaagacatggacgtatacgattattaaaaactttatctgaacatcgacgaagaggaaaaattttatggataaatttccatgtatcacggacagatgtaccagatgtaaatggaccaaagtaaacagcattatctttataagat

SEQ ID NO: 5845 - DNA, 200 bp, Lawsonia intracellularis
tgccttacaatttcaagtctagggaaaggaattcctttttgaattcgaaatagtaaatactgcttatcatcacgtaatacaatattatagcgtggacgatgtttttttatcaggctagcttcaagtaataatgcttctttctctgtattagtagatattgtttccaataaattagcatgattcatcattgcctttgtttt

SEQ ID NO: 5846 - DNA, 200 bp, Lawsonia intracellularis
aggcgttatcactaacccatcacgaaaataagataatactctctttcttaagtttctggctttacctacataaataatccgaccttgtgaatctttgtataaataaacaccaggagttgttggaatagatgatggatgaggtctctccatatttcctactatcttgaatacgttaaaaaatcagaggatatagtctcttc

SEQ ID NO: 5847 - DNA, 200 bp, Lawsonia intracellularis
actatttttattcaatacaacttttattgctttcctctttaataaacgttttactaactggggaagaggtaaacctaatatcgtagtatagttaccttcaataatatctattaaaaaagctcctataccttgtattgaaaaagctcctgctttatcatttgactcacctgtacttacataagaagataaaatatctttat

SEQ ID NO: 5848 - DNA, 200 bp, Lawsonia intracellularis
cccattggccaaattggatacttgctgtatcataaaatatttcatattgcacagaagtgatattttcttctaatggccacacaatacagcaacctgttataacttgatgttttcctccctgaaaacgagaaagcatagaaaaagaatcattgcctgattgaggtttgcctattatttcaaaaacatcatctttagtatat

SEQ ID NO: 5849 - DNA, 200 bp, Lawsonia intracellularis
ataactactgtgtctgcagcaatgataactgaacgtggttctaatgcagcagcagcaaaagcttttacttttgcagcccttataacatactctaaaggatgttcagaagaaagtggtaaaggctcactgtctacactaacaattttaaataaaagacctaattgctcaagcaaacttctacgtcttggagaggctgatgc

SEQ ID NO: 5850 - DNA, 200 bp, Lawsonia intracellularis
taatactattggtacggtttctataaaaacacttgatactctttgttgagtcatagtttagtcctaatctatctctttctctaacatatttatttaattattgacttcgtaattaaaatataggtttattgatgtataaaaaagtaatatagagaacttccatattatctttaaataaggtatgaaacggtatctgatct

SEQ ID NO: 5851 - DNA, 200 bp, Lawsonia intracellularis
gaaccgttatcataatggtgcctttgccttttctgaaagacaattaataaagctagaagtagtaaaagagctatagatcagacttattgaaaagtcattcaaaggatttgcaatgcccatttaccgtaaagttggtgctcgtcttacccaaatgcaggaattattctcccgaaatgataactggctgatcataattaatg

SEQ ID NO: 5852 - DNA, 200 bp, Lawsonia intracellularis
ctgatcctgatgctattgcatcagctatggctctaaaacgtattatgtcccgtcgaactgggaaagtatttattgcacgtattaatgaaattacccggccagataacctaactatgttgagacagttatatattcctcttgtcccatggagtgaaacactcctcccctttttccaaaaatttgctttagtagactctcaa

SEQ ID NO: 5853 - DNA, 200 bp, Lawsonia intracellularis
ccacatcatagtcctatattccaagacataccattctctattgttatagatcatcatcctattctacctgaatttccttcaaaagctacatattctgatattcgacctgaatatggtgcgactagtactatctttactgaatacttgcgtagtcttcatattagacctggaagacgtcttgcaacagcgctacaatatgg

SEQ ID NO: 5854 - DNA, 200 bp, Lawsonia intracellularis
tattcgaacagatactggaacattcactcgtaaatttacagatgctgatatcagagcctatcaatggctagctaaacatgcaagtaatacactgctaatacgtattacccgtagtgaatacttacaagactggttaaagtattttactcgagcctttacttctcttcatgactgtgggaaagggaaatttgccttcttag

SEQ ID NO: 5855 - DNA, 200 bp, Lawsonia intracellularis
gaaatattgaaaatcctgatattttagttgttgtaggtgatttttttactaaagtttatgggttaaaatggactgctatttgtggagtctataaagaacaagttgttattgtttttagaggagatgaaagtatagatcttggaaaatttgctagtgaacgtttttcatcattaggctctgcaggtggtcatagggctatg

SEQ ID NO: 5856 - DNA, 200 bp, Lawsonia intracellularis
gcaagagctgaattcccactgaaacttgttgaaggaaaaaatttagaagtttttatatttcgaaaactttcagaacgtctacattcaaaaaagaaaaactctaagaaagaatcagagaataatgaagaactatcaacaaaagaagaacataaacatccatcagaaccattaaatacaaatcaaactagttaactattatt

SEQ ID NO: 5857 - DNA, 200 bp, Lawsonia intracellularis
aatttcttaatcttcttttactctctatgtaccttacgttaccattcaattttaaaaactaaaattacattcctttaaaattctaaataacctggtgttctgggaaatggtaatacatcacgaatattagaaacacctgttaaaagcatcactaacctttcaaaccctagaccaaaaccagcatgtgggacagtaccaaa

SEQ ID NO: 5858 - DNA, 200 bp, Lawsonia intracellularis
tcgtcgtaaatccaggtaccaccaatactcttctatagattgacctagttctctaattcgagacaaaagattatcaagtctttcctcacgttgactccctccaatcagttcgcctatacgaggaacaagtaaatccattgctgcaacagtttcttcgtcatcattttggcgcatgtaaaatgcttttatttcttttggat

SEQ ID NO: 5859 - DNA, 200 bp, Lawsonia intracellularis
agtcaaaaataatgacaggatgtttaaaatattcttcagtaagatatttttcatgctcagattgaagatctaacccaaaagtaactggaaattcaaaatctttatggctagataataatattgtaatagcatcatgatatgaacaacgtataaatggcttggcaataatattctctaacgccttaataagtcctggttga

SEQ ID NO: 5860 - DNA, 200 bp, Lawsonia intracellularis
acatatttatcaagtaacattatgtcatctatatgacactgaagaactttcctaataacttcacaggttaactcttctgctagattcatattatcttgtaaatcagcaaatgccatttcaggctcaaccatccaaaactctgctgcatgtcgaggtgtattagaattttctgcacgaaaagtaggaccaaatgtatatac

SEQ ID NO: 5861 - DNA, 200 bp, Lawsonia intracellularis
ttttccaagtcccatagctaaacattcagcctcaagttgtcctgagactgtaagactacattccttaccaaaaaaattatcactagattgagaatcattgcttgagtgtgctgtagtaactctaaacatttcaccagctccttcacaatcagagcctgtaagaattggagtatggatgtaataaaaccctttcttataaa

SEQ ID NO: 5862 - DNA, 200 bp, Lawsonia intracellularis
aataattatggatagcctgtgcagcctcagcacggattctaaaaatagcgccatacttatttgtacgaactcgtagatgtgcaatagttcttaagaattcatcagaatgacgtttcttttgtaaaggaaatacctcaggagcagcaagaccatgtacaaccattttttctacttgaatttcccagtcttgacctctgcca

SEQ ID NO: 5863 - DNA, 200 bp, Lawsonia intracellularis
ggagaaggtacaagcttaccataaacagatacacaagctcctgtattaacaccgtcaagcatatcccaagcagcactaccttcatttataatacattgtatattctttagacatgaaccatcattaagttcaagaaacacaaaccccttagcattacgccttgtccgtatccatccaccaacatgaacatctgcttgtgc

SEQ ID NO: 5864 - DNA, 200 bp, Lawsonia intracellularis
tgttttcgaacaaagaatttctacaatagtactaggtagcatatatacaccttaataaacaaatatactagaatgataaaaggaaataaaaacaatatatatacattatattctcttccgtctcactcctaaccgaacccactcaataataataggtaataaagaaacaataattattccataaataactaaactaaaat

SEQ ID NO: 5865 - DNA, 200 bp, Lawsonia intracellularis
ttttctttattaatggcatattacccaaaaggtatcctgcagagactaagcctatcacccaaatagctgcaccaacaatattataaaataaaaacctgctaggattcatataggtaactccagcaacaaatggaacaacggtacggataataggtataaaacgtgcaaaaataactgctttcccaccatgcttttcataa

SEQ ID NO: 5866 - DNA, 200 bp, Lawsonia intracellularis
aaattatgcgctttaataagttgatctttattcaagagccatatgttacgactaaaaacatttggaccaatatagttacctatcatataatttacagcatcacccataattgctgcagttaaaaggacaataacaagtattggataatataaataacctgcacctacaactgtccctgcagcaaacagtaaagagtctcc

SEQ ID NO: 5867 - DNA, 200 bp, Lawsonia intracellularis
aggcaaaaagggagtaataactagtcctgtttcacaaaaaacaataataaaaagaatcacatataaaaaaattccatactcagccactaagggaaaaaggtgtgtatcaatatgtaatataaatgaaaaaaactgtcccagcaatgatgaatccataactctcctttgaataacaaggtcgctttctactaacatcttat

SEQ ID NO: 5868 - DNA, 200 bp, Lawsonia intracellularis
taattatacattatagcatgctatagtatattaaagttaatgcaaagtttacaatagtagcttttgaataaaactaatgttaaaataaagaaagttgactaggttttttttgtatatgtttcatcagctgactacgctgaaacatatctggaagattaactaaaaatctagaaggagcaagccttaacacattaccaaat

SEQ ID NO: 5869 - DNA, 200 bp, Lawsonia intracellularis
atagttctttgctctgaatagcttaaaaataatgcatctttggcacgtgtcatcccaacatataataaccgtttttcttcagcaatagtctcactattttcatactctttctctgccttttgtaaaagtcgttgtgtacctaaatatggtaaaagtccttcctctaatgctggtaaaaaaataactttaaattcaagtcc

SEQ ID NO: 5870 - DNA, 200 bp, Lawsonia intracellularis
cttagacgcatgtagtgtcataatttgaacctgttctgaatgactttttactaaatcaatttcttgtcgcaaacaaagccaattcaataaactctcccaagaaccatgtactttataggcttttaacaacttcttaaaactactggattcacgaaataaaggatcaaatggtgggacagattctaaccatgaaagaagtg

SEQ ID NO: 5871 - DNA, 200 bp, Lawsonia intracellularis
ctgaaggtcctccattccaaatatgtgttgcaatagaagaaggatcaggaactgtttgtattccaaaaggtcttccaaattttcttcctgcaagacctaataacaaagctacacgctgatcttcccaaaataattcagtttctggaacagaacaaggtacacctaatcttaccaaagactcttggaatggcttcatgagt

SEQ ID NO: 5872 - DNA, 200 bp, Lawsonia intracellularis
gccttcattctgacaagaatagcaatatcaccaggactacatagtcctgctaatggatgaggttcattaccagcccgtgcatctaccaatgtatgagaacttcctccaattaattgagataccttacttgcaacccatgaagcttcacggcaataatcaggtgctgtaaaaaggtgtaataaccctttatcctttctagt

SEQ ID NO: 5873 - DNA, 200 bp, Lawsonia intracellularis
agaagtaaggtttttactttgcttaccagaagcaagaagagctgaagctgagtaaacaacttcttttacagaacgatagttctctgcaagagtaataacttttataccaggccacattttactaagagctaattgaacattaggatgagcacctctaaaaccataaattgactggtcaggatcacctataccaaaaaacc

SEQ ID NO: 5874 - DNA, 200 bp, Lawsonia intracellularis
ccttacctgatgatggaacaagtaattttactaatgcaagttgaagtgaagaaagatcttgaatttcatcaacaaggactgccttccaaaatgttcctctgcttttctgcaaagtagaaatccattgttctaataagtcgctataatcaaccatattgcgtatttttttatactgtctatatttttcaagcataggaaga

SEQ ID NO: 5875 - DNA, 200 bp, Lawsonia intracellularis
tatgcctgttcaggcaatactgacgtatcaacttgcttttcacgtactagatttaaaatctcccaagcttttttgattaactttggttcattctcttcgttagctttaataaatacagcctgtgaagcctcctcagaaaggacatgtggctgactgccatcttcttttttgggccagtatccaagagctaaagcatgaag

SEQ ID NO: 5876 - DNA, 200 bp, Lawsonia intracellularis
tgtatcgactctaattgttcccttccctatagaatttcgtatacgttcttgtagctcctctgcagctctacggctaaatgtaacagccaaaatttcactgggttttatcccactgaatagcaaatgttctatccttcctattaatgtccttgttttacctgcacctggtccagcaagaactaatataggttggatatcag

SEQ ID NO: 5877 - DNA, 200 bp, Lawsonia intracellularis
cctttatagcttcattttgagaagttgaataagaaaagttagaagaagaactagtagtagttattatctttttatcatgatcttttttagttaaaaaaatatcaccatagctagccgccgttacactagaagattttggggaagacgtttctttctctccctccaaaagaacgcctgtagctgctaacaaaggcatagtc

SEQ ID NO: 5878 - DNA, 200 bp, Lawsonia intracellularis
atatatttgggtgataaattctttattgtttttgatttttcttgtgttgttactcgaggctttgagcttctagaaaacatttttccaggtagaaatgaagctctttctgcatcactaaagactcggataatgccatactctccatcataaccaccttgacgtataacttgcccacgacgcatacgcacaatagcttcacc

SEQ ID NO: 5879 - DNA, 200 bp, Lawsonia intracellularis
taattcattccagtattggcgaagatcacgttcagaaaccacatgaagtatattaaattccgttccaaatcgatgaataagttgtccatatttatcaagcactctcttactcattgagccaactcccaatatctctcctagtaactccacaagagggataaagggataataaggaggagtagctggcatataggcttctg

SEQ ID NO: 5880 - DNA, 200 bp, Lawsonia intracellularis
tcctatcagctaattcaagaattcgatgcaacactccaattgtaagctcattcccacaaacaggacacatatttcccatacgcatggcttcttttggctcaacaacaacaccacaagcacgatggccatctaaataatatttcccctcatctgggaaaaattcaactgtacctttatattgaacattattaggtatagaa

SEQ ID NO: 5881 - DNA, 200 bp, Lawsonia intracellularis
gggaatcttccagtagaaaaacgtagtgcattaaaaattccatcataagatggtagtccctcaaataaattggcttctcgaccaattttatccccagaatgtgcatcagaattagaaattaaagcacaaccatctaaatgactccaaagacgattcatttcaggatcagaagaaagacctgtttctaaagcaaaaatatg

SEQ ID NO: 5882 - DNA, 200 bp, Lawsonia intracellularis
tggtgcaagatcaccaaaacactcatccaaactattaaatcctgactttgaaccaaaaagagagaaccatggtgtccaaatatgggcaggaacgacagttcctctttcgtcaacttctaaaacaatctcaagtaaattacgacaatcaagaccaagaataggacgaccatctgaacgtaaattcccaattgactctaatt

SEQ ID NO: 5883 - DNA, 200 bp, Lawsonia intracellularis
ttcgacatagtttctctatgctatcaaagtcaggcatgaaaatcatattatgaaccttacgtactaatccatcttttttgtaaatagagctaatttcaccctgaagtaaaaataaaggatctggtgaatcagaaggaatctctattcctgggacttcactctgaaggacttctttagaaacaggaagcttataaagccct

SEQ ID NO: 5884 - DNA, 200 bp, Lawsonia intracellularis
gaggcttcatctaatataagttgttgttgtaactcttctctccacacaggatgtgtaatatctcctgtagcaataacagaaatacctttgatgcggctccaagcagctaaatgtggtgctgtaagctttttactggtagctctagaaaaacgagaatgtatatgtaagtcagcacaaaatatactcatataagatcctac

SEQ ID NO: 5885 - DNA, 200 bp, Lawsonia intracellularis
aactgtaatatattaattaattatagataataaatagaagaaaagaaaaacattattgagagataataacattataataaaatgagatatagttatttttagaaaataaaaagtttacaacattttattattatagaattttttatatattaataaaaataatagataaaaatagtataatataatgctacccatagagc

SEQ ID NO: 5886 - DNA, 200 bp, Lawsonia intracellularis
ataattaagtatcctatagtacatttataatagattgaaaactttactataaaggaacaataaaagataacctttctttctaacaactatagattatattaaattacaatcagatataatttcagtcaggttaaattatatctcaccattgttgaactctatcttttagggatagttactatcaagtcaagctaaaacca

SEQ ID NO: 5887 - DNA, 200 bp, Lawsonia intracellularis
tgctagcccaataagcttgtccaaaactaattcctccatctcctgatggtacatttttatgcataagtggtgtaagccctcgataccttaatgctttgggtaataaagaagatatagtttgattatttaatactccaccagataacccaacagttttaactcctgtattctctgagccaatcaaggctaaatctgctaat

SEQ ID NO: 5888 - DNA, 200 bp, Lawsonia intracellularis
ccttcaactagccctatatgaaacctgcgtgctaatatagaaacagatattttttgttgtaataactctattaattcttttaaaaaaactgttgtatctaattcataaatactatctttttcaactatagaaatagtaagactctcattacatgacatatcctgttgatgttcaagacgaatagctgcttgcccttcata

SEQ ID NO: 5889 - DNA, 200 bp, Lawsonia intracellularis
tgtaatgtaatcacataatccaaataaagtagaaactgtatcaaataacctcccacaacttgaagtcaacttcactttatctttggataccatttctctgattgcactatgaatcgtccatctctcaggagaatttttccatagctgtcttacaaggctatctactccttctagttcatgtatttttaataatgctaaaa

SEQ ID NO: 5890 - DNA, 200 bp, Lawsonia intracellularis
aaccgcttaacaaacgccatggttcatgaatagctttttctcctccaggaagaggaaggagtgatagtctagctagtcgttccccttgctcatatgacttcccttttacagcttctggatataaataaaataattctcctccccatatagttccatccataccatatcctgtaccgtcaagagtcaatacgagtgccggc

SEQ ID NO: 5891 - DNA, 200 bp, Lawsonia intracellularis
tctttatgtccatgttcagctaacacactataaccgtgtgcaatatgatgctgtaactgtaagattggtaaaccaaactctgcggcataccgtgtagtaaaatagtctggatgtaaatcacagacaacaacttcaggagaaaatccaaataattgggaaatatgttttactgtttgacaaaatgaccattctgtttctgg

SEQ ID NO: 5892 - DNA, 200 bp, Lawsonia intracellularis
ttcagaaagatctcctatatgttgacttaaaaatatatcctgtccccttgtaaaacaaaatgtacttttatgttctgcacctaatgctataatgcaaggagtattatcctttaaagttttaactgttataggtagtggtgcatatcctcttgcacgtctgataaaatgccaattaggtgattgtcctatgttgtcctctc

SEQ ID NO: 5893 - DNA, 200 bp, Lawsonia intracellularis
ttaaacaaacaacagagtcatcaactggcacaataatatttctattatgaaataaaaaaaaatctgtaatagtattaagtcgtatcagtgcatcgtcattattatatattatagtaccaccacttacattagcggaggtcataacaagagcaggaattattctttctagctcagcaacttttgttaatgtattacataaa

SEQ ID NO: 5894 - DNA, 200 bp, Lawsonia intracellularis
atgtgatgcagtggagtataaggaagcataagacctatagtagaaacatctggagcaatattttttggtaaactatgaggaattgctttcaaaataactataggacactctggtgattgcattttttggatttctacttcactaatataagcaatttgtcgagcaatatttatatttggaaccataacagctaatggttt

SEQ ID NO: 5895 - DNA, 200 bp, Lawsonia intracellularis
atctgggcgatttttccgatagcgtaatgtattaactacgtcagcattagtagcatcacaaataagatgaaaaccaccaatccctttcatagcaataatcttacctttataaatatactctatagctaacaatattgcttcactattataagtaatatatctattatcatgatctgttaaccataactgtgggccacatg

SEQ ID NO: 5896 - DNA, 200 bp, Lawsonia intracellularis
ttggacatgcattagattgtgcatggaatcgtctatctaaagaattattatattctttttcacaggtaaaacaaaaaggaaaagaggacatagaagtatgatgtcgatcataaggagctttatgtataatagtatatcgaggaccacatagtgtacaacttataaaaggatattgataacgatgatcagtagttgtattc

SEQ ID NO: 5897 - DNA, 200 bp, Lawsonia intracellularis
aattccttaacacaatactcacatgtagcaatatctggacttattaatgaagtatactgtatcccatcagagctttcttcaataagaaactctgtttctttatcctgaaaaccaagagattgcatagtaattgacgtaaattgagcaatagaaggtttttcattagtgatcatttctttaaatatatttaatttactatc

SEQ ID NO: 5898 - DNA, 200 bp, Lawsonia intracellularis
atccccttgaacttcaatccatactccatatatagtattttttactttacctgtaaggcctaattttgtagcagtacagtatacaaaaggacgaaaacctacaccttgtactcgaccttttattgtataaccttgtctctttaactgcatattatataacctatttaacacgcccattaatcaagagtaaaatataagag

SEQ ID NO: 5899 - DNA, 200 bp, Lawsonia intracellularis
tattactcctatgctagtgattaattagcataatgctatctattctctcaacaaatattatatagaaatataacaacatttataaagacttgccacaaaatcatagtctcgatatattaattttttctattgtaaaaactgcattaactttctaaatttttatttagaaaaacacagaggtaaagataatgctcttttct

SEQ ID NO: 5900 - DNA, 200 bp, Lawsonia intracellularis
tttcgttttattacctatcccctcataacaatttttatattatatacttgtcataatgcgcttgctagtaataatgattcaatgattacctctgaaaattttgaaagccaattacgacttcttcttcataaccatcctgagcttgtccttgatgtactaagagagcatagcgaacttgtccttgaaattgcccaacaagg

SEQ ID NO: 5901 - DNA, 200 bp, Lawsonia intracellularis
ttctaaacagcgtcaacataaatcccttatagcacagtggaaaaaagacataactactccaaaaaatatgcatctggaaaatagaccaatccgagggaatccaaaagcacccgtaactattgtagcattttcagactttacatgtttgtactgttcacaagcttctaaaactgtacaacaaatgcttattgattataaag

SEQ ID NO: 5902 - DNA, 200 bp, Lawsonia intracellularis
ataatgtaaaatatatttttaaacacttcccgcttaaaggacatactatttcacaacaagcggcaatatatttcattgctgcatctttccaaagtaatgaaaaagcatgggcactttatgatcttctttttcaaaaaagagatgagctattacaaaacggtgaacagactcttaaacaagcagtaaaagaagtgggacta

SEQ ID NO: 5903 - DNA, 200 bp, Lawsonia intracellularis
gatataaaaaagttaatgagtgacctcaacaaagcagaagtaaacaatattcttggacaagacataaaagatgctgcacaacttgatattagtggtactccatactttattgttaataaccttatccttcgtggtgcattacctcctgaattattcacagaagcaattaatatggccttaaaaaatacaaaagaagtgtc

SEQ ID NO: 5904 - DNA, 200 bp, Lawsonia intracellularis
aacatctccaaaataaattctaaaaggtgtcataactacaacacattactatataatgaaacctatgctagtatatttattacaatactttttagttagcttttttaacatgttatccatcttttcatgattatcaaatgtgatattgatacaattgccctccctaaaaactttcttaaagaaaaaaagacaaccattac

SEQ ID NO: 5905 - DNA, 200 bp, Lawsonia intracellularis
tttaggaaattttgacggtgtccatcttggacaccaagctttgttaaaaactatttatttaacagctaaaaaacagcaatctatctcaacggttattacctttgaaccacatccacaggccgtccttataggagaatccccatctctcctgactacaaaaaaagaaaaattaaagctaattaaatcaatggggatagatc

SEQ ID NO: 5906 - DNA, 200 bp, Lawsonia intracellularis
ttatcttccagctcaactttacatctacattagcaaatatgacaacggaacaatttgtgcaatcgattttattggaaagacttcatatggaaggtatagttttaggacacgacttttctatggggaaagaaagattaggaacacaacatgttttatcaaccctaggaaaaacaatgggatttacagtaacacatcaacct

SEQ ID NO: 5907 - DNA, 200 bp, Lawsonia intracellularis
gttttcacatttaaagaacagcctgttagctcaagtcttatcagagaagctatccaagaaggagctatagaaaaagctaacttactcttaggtcgttgttactcaatagatggtactattatacatgggaaaaaacgtggtagaatgcttgggtttcctacagctaatcttgcattatcatctaatttaattccatctac

SEQ ID NO: 5908 - DNA, 200 bp, Lawsonia intracellularis
tggagtttatgcaacattagtcaccctagaatcaaatcaagataataccttttatatacctgtacaacatcaaaaaaatacatttttagctgtgactaatataggaataaatccaacttttggagattcaattcctaaaattgaaactcatttattaaattttcataatgatctctatgagcaacatatgacaatcaatt

SEQ ID NO: 5909 - DNA, 200 bp, Lawsonia intracellularis
ttctaaaaaaattaagagaagaagccatattctctaatatctcttctctaataacacaaattaaagatgacatatcccaaaccaaaacaatttttaagaacatgttgtggcctcaatcactcagtttagaagatccagttgatcgcatggatgcgaccctaaaaacctaatagacgggtatattcaaggaggaattatat

SEQ ID NO: 5910 - DNA, 200 bp, Lawsonia intracellularis
gtctcttgtcattaataacaacctgatggccgtcaatgctcaacgtaacttaagcaagtcttatggagaactgagttcttctgttcgaaaactttcttcaggtcttcgtgtaggaactgctgctgatgactcagcagggttagccattcgagaactcatgagatctgacattgcaacaacacaacaaggaatacgaaatg

SEQ ID NO: 5911 - DNA, 200 bp, Lawsonia intracellularis
cgaatgatgctatttctatgattcaaactgcggatggtgcacttggagtcatcgatgaaaagctcattcgaatgaaagaacttgctgaacaagctgctacaggtacatataactccactcagcgtatgattattgactctgaatatcaagctatggcctcagaaattactcgtattgctaatgcgacagaatttaatggt

SEQ ID NO: 5912 - DNA, 200 bp, Lawsonia intracellularis
ataaaacttcttgatggttcattatcaggtaatcatgatgggaaaaaaataaattcaactggtgcagtacgtatccactttgggacatctaacagctctgctgaagattactatgatattaaaattggtggctctacagcttctgcattaggacttggtaatacagtaaaaggtgcgggtgctacagtctctactcaagc

SEQ ID NO: 5913 - DNA, 200 bp, Lawsonia intracellularis
tgcagcacaaaatgccttaaaagctatagataatgccattgtttcaaaagataaaattcgagcacaccttggtggattacaaaatagacttgaagctacagttgataatttaagtatacaaaatgaaaacttacaagctgctgaatctcgtatatctgatatagatgtaagccaagaaatgacacaatttgtacgtaacc

SEQ ID NO: 5914 - DNA, 200 bp, Lawsonia intracellularis
aaatacttacacaaacaggtgttgctatgctttcacaagctaattctctaccacgtatggctcagcaacttattggctaaaaaaaaatatatatatacaacggctcctctttattaagggagtcgttgaaatatacaattaacttcactcaaaatatctttatctggtaactaaagaactaactattatctatgaaacta

SEQ ID NO: 5915 - DNA, 200 bp, Lawsonia intracellularis
tttattgtaatatgagttataaaaatttaaatactacgttcattacctatagaatgcttaataaattctctaaaaaacgtatcatgctttttgacaaaagtaactatttttgactccaacacaaaaggttttgaatctgctgtatattcaaaaacagctataataatcatacaaaaaacaaaagcttttaatgcaccaat

SEQ ID NO: 5916 - DNA, 200 bp, Lawsonia intracellularis
tactcctcctcccagccaatttatccaacctccagacttccatcctaaatgcttctgcaataacccactcataatagaggaaataatcattacactaaaaaagattgctatatatgctaaaaagtaagaccatttttgagaacctatataacttaataacatattaccgaattttatatataacatataagcagtccata

SEQ ID NO: 5917 - DNA, 200 bp, Lawsonia intracellularis
agcttataataaaaattattatacctgctaattcttgtaataaccccctattaagaccttttaaaataaagaaaatacataagataactaatacaagatctaatatatttagttgatataataagttcataatataaaatatatctataatattgttattaaatttttaacatatctctagtcttctttaactatatatt

SEQ ID NO: 5918 - DNA, 200 bp, Lawsonia intracellularis
aaagtaggctagattagccttcaaatttatactatatataaaaatagttataaagtatactaagatatttctaaaaatgtataaaaatataaaaagtattgttaaaaaatctactaaaaatttttctacaaaataatttttttaaaagatagaaattttttcaaatattttaaaaaataatttagaatataaaaatatat

SEQ ID NO: 5919 - DNA, 200 bp, Lawsonia intracellularis
tgtgaaactatattctttctctaactaatatttattagtccccaacagcatagaaagcaatattatgtaacttaatttgcttaagtataataatattacctttcttataaaattataataatatcttaatagggaattgagttatttctaacttgaccaatatatcaaattcagaatacattataactgtgactaatcaa

SEQ ID NO: 5920 - DNA, 200 bp, Lawsonia intracellularis
tggaagggtggcagagtggcttaatgcggcggtcttgaaaaccgttgacgttgcaaggcgtccgggggttcaaatccctccccttccgccagaatccaaataatacctttaatctttaatataattttttatataaaaattataagacaaatttttaatctactcttatccaaaaattctttataaataaaaatagacaa

SEQ ID NO: 5921 - DNA, 200 bp, Lawsonia intracellularis
tattttactctacttgcaatgaacctctgaatgaatcaaagtttttgataccaagttcattacaaataataggtaatgcctcagcaatacgaaatgcaatatctggttgaataaaattcattgttccaatctgtactgcatgagctcctacaagaataaattctaaaacatctcttgctgaggtaatcccaccaatacct

SEQ ID NO: 5922 - DNA, 200 bp, Lawsonia intracellularis
attacaggaatgtttacagccttacacacttcccaaacacatcgtagtgcaataggtttaattcctggaccagataggccacctataactgtagataacaatgacttacgttttctaatatctacagccattccagttagtgtattaatacaagaaatagcatcagctccagcactctcaacagctttggcaataatagt

SEQ ID NO: 5923 - DNA, 200 bp, Lawsonia intracellularis
aatatctgttacattaggagaaagtttaaccatcacaggtttacttcctgcattcttacacacagcttcagtaaccttagctgctaaactaggatcctggccaaaaaatgttccaccactttttacattagggcaagaaacattaacctctaaagcagcaactccctcttctgctgccaaaatagctgtaagttcactaa

SEQ ID NO: 5924 - DNA, 200 bp, Lawsonia intracellularis
attcttcaactgatgtcgcatatagattagctataactggagtttctttccaaggtaagcgtggaagctttttttgtataaataattcaacaccatcattttgtaagcctatagtattcaacatcccacatggtgtttcagcaattctaggtaatgggtttccttttcgtggctttaacgataagcctttaacaataatc

SEQ ID NO: 5925 - DNA, 200 bp, Lawsonia intracellularis
cctccaagttgagacaaatcaccataccctataaactctgctccataaccaaatgttccagatgctgttaaaacaggatttttcaaaactaaaggaatgcttgaagtcgtagtaagagatacggtatagttatccatggtgatcctcacaatgtaatttgatcagcccaaaaaacaggtccatttgtacatgtaggaaca

SEQ ID NO: 5926 - DNA, 200 bp, Lawsonia intracellularis
ggcataccagccatattttttactggccatttatctgtagtttgcacaacacaaccaagacaagcaccaaccccacaagccatttgtgactcaagagaaagttgtgttcgaacattattttcaagagcaatagactgcacaaactttaaaaatggggtaggtccacaaacaaggatcaaaccattacaagcagcatagtt

SEQ ID NO: 5927 - DNA, 200 bp, Lawsonia intracellularis
tttaacttgtgtactaacttgttcaagaaatacttctctatcttgaagagtattttcttggaaagaaaaaaaatttactttttctgataaattttcaataggatagcaatcattaggatatttatgactaaacatcatataaagatttttagggttgggatgagaatcaatatatccaataaaaggagcaataccaatcc

SEQ ID NO: 5928 - DNA, 200 bp, Lawsonia intracellularis
ctccggccaaaatcagtgtaggcttttcttctgtactaaaacggttgcctaatggtccccataaatggaccatattaccactccgtaagtaagccatccgctctgtacctttaccagaaacttgaaaaaaaataactaattcttctttagttaccctacagatagaaaaaggacgtgcccaaggaatttctaaattccaa

SEQ ID NO: 5929 - DNA, 200 bp, Lawsonia intracellularis
ctttgaggacgtatcataacaaactgtcctggagcccaacctttccaatctggaagttccaaacgtagtgcaaaaaaatgtccttgcatacctgcaagaccaaaagggatattatcaataactgcaaggttataaaaattggcacttgccataatagacctagccttattggtttaatcaattaatgataacaaaggatc

SEQ ID NO: 5930 - DNA, 200 bp, Lawsonia intracellularis
atcttaaaggtagtgtcctatcaaaagaaggtcaagagcagaaaacttgttttttctttcaaaaacactctttacctttttactattgttacctaaattatattgttaggtaaagataataaaacctcctccaatgatatactatctactataaaaaattactaaacaaataaaaggcgttaaacagttatgtataatat

SEQ ID NO: 5931 - DNA, 200 bp, Lawsonia intracellularis
gcccaaaggatttcgttttgctacagctagagctgggttccgtagagcatactgtaatgacacagctcttgttgttagtgaaacacctgctgttgctgcaggcacgtttactttgcacaaattcccagcagctcctgtccaaataggaaaggaaagactatctaataatctaacaatgcgagctattcttatcaattcag

SEQ ID NO: 5932 - DNA, 200 bp, Lawsonia intracellularis
gacaagccaatgcttgtactggctatgaaggattaaaaaactgtcgccacactcttgaactcctttctaatgctattggttttaattcacaaaatattttacctgcctctactggagttattggtgttcaattcaacatggctctctgggaaaaagttattcctgtccttatagaacgactaggtaaagatggtccagaa

SEQ ID NO: 5933 - DNA, 200 bp, Lawsonia intracellularis
gactttgctaaagctattatgactacagatgctttccctaaatttactcataaaaaagttcaattatctcaaggtacaattaatattgtagcaatggccaaaggtgcaggaatgatctgcccacagatggcaacaatgctagctgttatactttgtgatgctgacattcaagtagagtgttggagagaacttatctccca

SEQ ID NO: 5934 - DNA, 200 bp, Lawsonia intracellularis
tacagtaaacataacattcaaccgaataactgttgatggtgacacatctactaatgatactgtttatgctctttctaatggctgttctggtatttctattacaaataatgaatcattgaatcttcttcaagaggggcttacgtctatattaagcgaacttgcttatatgttggtacaagatggtgagggagccacaaagg

SEQ ID NO: 5935 - DNA, 200 bp, Lawsonia intracellularis
ttggacatatttatgtcacaggtgctttatctgacaccgacgcagagactgttgcacgtaccgttggcaactctcaacttgtaaaaacagctctttttggccaagatgctaattggggcagaattatagcagctattgggcgtagtcatgcaacatttgacccactagcggtttgtgttaaactttgtggtgtaactgtt

SEQ ID NO: 5936 - DNA, 200 bp, Lawsonia intracellularis
tttttaaatggtcaacccaccaaagataactttgatgacatacttaaagaaccattacaacaaaaagatatcctaatagaaattcaactaggacatggacctggtatgtataaacttctaacctctgacttaacacacgattatataacatgtaattcagcatatagaagctaacttcccatatataaattatagaaaaa

SEQ ID NO: 5937 - DNA, 200 bp, Lawsonia intracellularis
atctttttaagagtaatactctactagtaaaaaattcttaaaccttacttcttagctataacttatagtaattttatacagttataataattataagtagatatcttcttattatctatatgttttttagtataacttttgtatatcgagcttattatgcaacctattatagttagttcaaatgaggcaggacaaaaact

SEQ ID NO: 5938 - DNA, 200 bp, Lawsonia intracellularis
ttttcaatttttaactcgccgtttaactgtacccaaaagcatattacaccgctggatccgtacaggacaaacccgtattaatgggaaacgtgtgaccccctttactatagtaaactttaaagacaaaatacgtattccaccttttgcatacgaatataaaaaaaaagatttaacaacctctcttatacataatcaatatg

SEQ ID NO: 5939 - DNA, 200 bp, Lawsonia intracellularis
atataagccctataagctctcatactacttctccacttcccccagttatagctcactccccagagtttattatattttataagccagctggcctagctgttcatggtgggacaggacaaacagatagtttagctcaccgattatcacaacattatgcacatagtacttttatgccaacacctgtacatagattagataaa

SEQ ID NO: 5940 - DNA, 200 bp, Lawsonia intracellularis
gatacatctgggcttcttcttgttgctaaaacatataatagtctaagatatttttctgaactttttgcttcacatagtacacaactaacaaaagaatatcttgcatgggtagttgggatatgtccatggactcaacccatctgccttgaagatatccttactaaaaaacaaaaacaggataactattcaagacttaatag

SEQ ID NO: 5941 - DNA, 200 bp, Lawsonia intracellularis
ttaccaaaataaactacaacaaacttcagctcaaaaggcttcattaacagtacgttgtataaaacagtataaagataaaagcctattacttatcaagcttcatactggccgtacacaccaaattagaattcaactttctattcatggttttccaattattggagataaaaaatatgggaatacaatacgttctcacaatc

SEQ ID NO: 5942 - DNA, 200 bp, Lawsonia intracellularis
ttaaacttcatgctttcagattgagttttccaggatatacgtttactattcttccctcatgggatgataagtggcaagttactcaagaagatatacctaactaatttaattatgagatattatataacttgttacaacaatagcatattgtagatattttttttataccttatagtaactagcaaattatattgtaatag

SEQ ID NO: 5943 - DNA, 200 bp, Lawsonia intracellularis
ctaaaacaacattatatgttttccaaaagataactgggactattcatgaagtacatgctttctctatggattaatatcttattttgctttttttttattgtaaatccaatatatgctgaaaaaaaagaacattatattaatggaattgacgctcattatccaccttttagttttatagatgaacatggggatcctacagg

SEQ ID NO: 5944 - DNA, 200 bp, Lawsonia intracellularis
atttgatgtcgaagcacttaattggattgcaaacaaactaggctttacagttgaacatcgtcctataagttgggatggaattattcctgcacttcttgcaaaaaaaattgatatgatctgctcaggaatgagtatttctccagaacgtgaaaaaaatattctttttacaagaccatattggataacacaaaaaatactta

SEQ ID NO: 5945 - DNA, 200 bp, Lawsonia intracellularis
ttgttcataaagatagtaaattaactcctgaagaaattttttatggagaaaatatcatagtaggagtacaatgtggtacaaatgaagcaacgtttcttgaaaaagagctaaaaaacaaaggttataaatataaattacgctattatgactcttcacctcttgtaattaaagacttgcttaatggaagaattaatgccgca

SEQ ID NO: 5946 - DNA, 200 bp, Lawsonia intracellularis
gtcatggattgccttcctgttgataatgctattaaacataataaagctataaaaaagctttatatcatagattatagcgatgcctttggtgttgctgttagaaaagaaaacactcaactagcaaaacgtattgaagatgggtttctacttttacaggctgatccattttgggaaacactaaagcaaaagtatctaccttt

SEQ ID NO: 5947 - DNA, 200 bp, Lawsonia intracellularis
aagagaaaacccttagccaacttatatttatttaatataatctttatatatgaaggggattatattttaaaatgttgaatatttcctctgaactactacattctattaatattattatagaagctcttcctaatattttccaaggaagtttagttactataataactgtacttctagccctttttattggacttattctt

SEQ ID NO: 5948 - DNA, 200 bp, Lawsonia intracellularis
ggtataccaatggcaattttacaagtatatggaccaccatatattaggtatagtattcaaatttactgttggttttttagaggagtccctattctactcctcttatttcttttttactttggtctctttgaacttcttcaacttaacttctctgcagtcactacctcatgtattgtccttgggattgcaagttcaagtta

SEQ ID NO: 5949 - DNA, 200 bp, Lawsonia intracellularis
tcaaacacaaataatcagaagtgctatccaaatgataccttctggtcaactaaaagcagcaaaagctcttggaatgaccagtactcaagctatccttgtaattattctaccacaagcattaaggttatcaatccctggttggtcaaacgaatactctatccttcttaaagattctgccatatgttttgttcttgggacac

SEQ ID NO: 5950 - DNA, 200 bp, Lawsonia intracellularis
cagagattatggcacagacacaatttgtagcttcaagaacatatgaacacttactactatatattgttgcaggaatcctttatttccttattacacttataggtgtttccttactccgtcgacttgaacaatatctttatcttcctggatatactgcctctctccattaaggatgtctttatgatagattctacatatcc

SEQ ID NO: 5951 - DNA, 200 bp, Lawsonia intracellularis
tattctctatgttaaaaatattacaaaatcatttaataataaactgattcttaataatatatcggttaacattaataagggcgacattaaagtgttgattggcccttcaggtgctgggaaaagtacttttctccaatgtcttaactgcctcattttacctgatagcggaggtatttacctatatggagataaaatcgatt

SEQ ID NO: 5952 - DNA, 200 bp, Lawsonia intracellularis
tatcaaatcactatagcttatctgaattacgtaaaaaagttggaatgatttttcaagactttaatctatttgatcacctaaccacagaagaaaatatttcgattgctttacgtaaagtagctaattattcttataaagctgcaagagaaagagcattagaagaacttgcacaagtaggattaatagacaaagcaaatcta

SEQ ID NO: 5953 - DNA, 200 bp, Lawsonia intracellularis
taccctgcacaactttctggaggacaaaaacaacgtttagcaattgcacgtgctttggcaatggaacctaatgttatgctacttgatgaaccaacttcagctcttgatcctaaattaacatgtgaagtcctaactgttatccaaaaattagctaataatggtatgacaatggtgattacaacacatcagatggactttgc

SEQ ID NO: 5954 - DNA, 200 bp, Lawsonia intracellularis
ctgtgctattgctacagatattctatttatggaacatggtgaaattgttgagcaaggttcaccatgtcaacttctctctccagaggctcaaacaagaacaaatggcttcttcaaatcttttatttctcctcttcaaagtaattcattatctatagagaaaccatctatcagcatgttactttcaggagatctttctcatg

SEQ ID NO: 5955 - DNA, 200 bp, Lawsonia intracellularis
atctaactaatagtggtacagaatccatttctttccctgaaaaaaacgaaaattaatatgctgttagatattacatttattacccagactgttgtacctactcttaataaaggtctactggtatctattgctttaattattccatcagctattattggttttctacttggtgtttgtataggtataattcgtgtattcgg

SEQ ID NO: 5956 - DNA, 200 bp, Lawsonia intracellularis
aaaacgttggttacaacgtttaggaaatatattcactctcattttccgaggagttccccttaccgtccaacttatgattttatattttggccttcctaatataaatatttattttgaaccatatattgcagcagttattggatttaccctatgtactggtgcataccaatcagaatatatccgtggagcattgctctcaa

SEQ ID NO: 5957 - DNA, 200 bp, Lawsonia intracellularis
taaaaaaaggacaactccaagcagcttatgctcttggcttcactcgactaaaagctatactttttattattattcctcaagctacacgatatgctttaccaggatgtggaaatgagcttgtttatcttataaaatattcttctcttgcataccttatcacatgtatagagctcacaggtgaggcaaaaattcttgtctct

SEQ ID NO: 5958 - DNA, 200 bp, Lawsonia intracellularis
caaacagttaagcccatggaaatatattttatagcagctatatactatttaagctttgtttctattgctacctggatactaaaaaaattagaaacactgtatgctatcccagggtttggcaaaaaacatatcgactacttataacatatactatactaaaaaaacttctcttatgttatctaaaagtagttaaatgaagg

SEQ ID NO: 5959 - DNA, 200 bp, Lawsonia intracellularis
atctcctcatgcctatccaagaaaatattagaaactttagtattattgcccacattgatcacgggaaatctactcttgcagatcggatccttgaatatactaaccttgtttcggatagagaaaaacgtgaccaatatctagataaaatggagttagaaagggaaagaggtattacaattaaagcacaaacagtgcgaatt

SEQ ID NO: 5960 - DNA, 200 bp, Lawsonia intracellularis
ccatatataactgctgatggaaaaacttacatattaaaccttattgatacacctggtcatgtagattttaattacgaagtctctcgttctttatcagcctgtgaaggatcactacttgttatagatactactcaaggagtagaagcccaaactcttgccaatgtatacttagctctagaacataaccatgaggttattcc

SEQ ID NO: 5961 - DNA, 200 bp, Lawsonia intracellularis
tatccttaataaaattgatcttcctagtgctgatatagaaaaagttaaagctgaaattgaagaaactattggacttgattgctcgaccgctatctctataagcgcaaaaacagggttaggagtagatagtgttcttgaggctattgttcaacaactaccagcaccaaaaggagatccaaacaacccactaaaagctctga

SEQ ID NO: 5962 - DNA, 200 bp, Lawsonia intracellularis
tatttgactcatggtatgatgcatatcaaggtgttgttgtactttttcgtataatggatggaacaataaaaaaaaatgatataataaaacttttttcaacagaaaaaagttacgaaattactcgactaggagttttttctccagaagcaatagatatcccacaactttctgctggagaagtaggatttttatgtggtaat

SEQ ID NO: 5963 - DNA, 200 bp, Lawsonia intracellularis
atcaaaacactaggtgacgctaaagttggcgatacgattacacttcttcataatccctgtaccaaagcaatcccaggatttaaagaaattcaacctgtggtattctgtgggctttatccatctgaatcaagtgattatgatatacttaaagcagcattagaaaaacttcaacttaatgacgcagcattttcatgggagcc

SEQ ID NO: 5964 - DNA, 200 bp, Lawsonia intracellularis
agaaacatcacaagctttaggatttggttttcgttgtggatttcttggtttattacacatggaaattattcaagaacgtcttgagagagaatttcaagtagaacttattgctactgctccctcagttatttataaagttgaaacaactgacgggaaaatacaagaaattgataatccatcaaaactccctgaactaggga

SEQ ID NO: 5965 - DNA, 200 bp, Lawsonia intracellularis
aaattgttcacttatatgaaccatatgttcatattgatattcatgtcccaagtgaatttgttggaaatgttcttaaattatgtgaagaaaaaagaggtatacaaaaaaatattgcttatcctgctcaacaacgtgtaattattacatatgaactcccgttctctgaaattgtttttgatttttttgaccgtcttaagtca

SEQ ID NO: 5966 - DNA, 200 bp, Lawsonia intracellularis
gcaacaaaaggatatgcctctatggactatgaagtcatagactaccgcatatctaatcttgtacgtcttgatattttactaaatggtgaacctgttgatgcgcttgctgttattgttcatcgcgataaagcatatcactatggccgctcattggctatcaaactcaaaaaaactattcctagacaaatgtttgaagtagc

SEQ ID NO: 5967 - DNA, 200 bp, Lawsonia intracellularis
aatccaagcagctattggccaaaaagttattgctcgagaatcaatctctgctctacgtaaaaatgtaactgctaaatgctacggaggagatataacacgcaaacgtaaattattagaaaagcaaaaagaaggtaaaaaacgaatgaaacggatggggaatgtagaactaccccaagaagcgtttcttgcagcactacaaa

SEQ ID NO: 5968 - DNA, 200 bp, Lawsonia intracellularis
tgggagacgattagtactatagactacccaactagcataataatataataatacaagggattgtgataattgaaagtgctgtatttaaaaaaatatcaagagaagcatatcatgtatatacataatatttttcagcaataatataagctataataccttttggcatagctacaattaatactataacacctaccaactta

SEQ ID NO: 5969 - DNA, 200 bp, Lawsonia intracellularis
ctattcaaacctagtaatgtaaaacaacagtaagttatcaatggttgaatagctaatttaagaatatgtactggtaaatgttgtataaaccagcctgctacaaaaccctctgaagaagacaattgtgctgtcaaaatcatacctatacaaaacaatgcacagagtgctgccgttccaccaagtatagtagccatagttaa

SEQ ID NO: 5970 - DNA, 200 bp, Lawsonia intracellularis
tagcggagttggtataaaaaaactagtaatattccataatccaacaagaatggaatctaaaaatactggatttctcataaaagaaaaaaacttttgtaaagcaatccattgtgtttctgatttatcttcaaataaccttagctacccatctacaaagagtaaaataaacgaactaaagacagttaataaacctcctatag

SEQ ID NO: 5971 - DNA, 200 bp, Lawsonia intracellularis
caacagcgattgtatctcctgggaacaatagtgctactattggtactcccataagccctgcattataaaaacttgccaatgatatcaaaatgatattttcttcaaatattttttttaagaaaaagaaaaatactatatgctataagataggtgacaactatatctaataaaatccccaaaataaacgttgaaaaaaactc

SEQ ID NO: 5972 - DNA, 200 bp, Lawsonia intracellularis
accaggttctattcttactaatttataaaaaacaatgcatggtaaagctacgttatatgtaaactgattaagacctacggaaagacttgcaggcaaaaatcctgaatagtaagtaagtgctccaaaaagaataataccaaaaataggaataagagttgtaataatatccaattgaatcacttagtataagttatgtacta

SEQ ID NO: 5973 - DNA, 200 bp, Lawsonia intracellularis
tataaatttttatctttctataacactatatgatgctactatataaaactatttctttaataatagttcaatttcttcacgaataactcgtacagctgcttcagcagcaaatttatcaatctctggctgcaatctatcaaccacttcttttacaagtatatccatctgcaaagaattatctatcttttcatctatagaat

SEQ ID NO: 5974 - DNA, 200 bp, Lawsonia intracellularis
taaaacgcatcacatttgaatcttgtaactcctctacttctgactcatgagccataataattaactctaatgcacttactctttgcttaagagcctgagactcattttctaactgttggattctaacattcaactcatctataactgtattagtaacagaaggaagtacactactaacttctaaagttgtatcagaagat

SEQ ID NO: 5975 - DNA, 200 bp, Lawsonia intracellularis
tgcaccttttttgcagctgtctccattactctagaatcattactactaatttgaatctcttcagaagatactgctgatagtgattgtggcacattactattattatctagtagattcttttcatttgctaaaaatgctggatcttttactgcatcaagaatagcctcaacttctcctttatctttatctgatagtatatg

SEQ ID NO: 5976 - DNA, 200 bp, Lawsonia intracellularis
ttctacatttgttacatcttcaaccacaacatcaggtaacgtcttatcaatatcttctaactgattaggactctcctcttgttcaactacatccacaatttttttaggtgaaatatcaacagtagagtctaagtcttcttccataagtaaatcatctaggtcatcaaggccatcaagtgccttttctaaaaagtttgttt

SEQ ID NO: 5977 - DNA, 200 bp, Lawsonia intracellularis
tatcttcattagtcgaaaattctaattgacctaaattcaaacttgcattggatgattctttttgatttttaattggctctttttcttcttcactgaataaattatcaagcagcgcatctaaatcttctgggtcagagtctattttacttaaaacatttgtttcaaccttttcttctccaagattatcaagaagatcttca

SEQ ID NO: 5978 - DNA, 200 bp, Lawsonia intracellularis
ctatcaatatcaacttgttgagagttattttcttcttttacctcttcagactcttctgcaaaaagttcatctaagtccggaatatcctctaatgaaatgggatcatcattactaagtatatctgaaagctgtgaatcaaagtcaactttttcagaatcctgactttcacttttgtcagaagattgaacaatatctactaa

SEQ ID NO: 5979 - DNA, 200 bp, Lawsonia intracellularis
gtcaatgatatcatctagtgactcaagagttgcatcttttgccatattggcctctattaataatgtttattaatcatcccttctaacagatatatagaactatagtagttataagattcaaaaataaataacagttatacttatatacttatactatagttttacctatgccatattttttctactttgcaagtaatatc

SEQ ID NO: 5980 - DNA, 200 bp, Lawsonia intracellularis
catgcattacccattccagacaaagaaatgctttcttgataagcttgttgaccactaccacaaaatatatctatctttttccccttaacaccaccactatcttgagcaataccaataccacaggtttcttttgtaaactcattagtagaagcattattagataagtcaaaagctataattgcccccaaaggaaatacaga

SEQ ID NO: 5981 - DNA, 200 bp, Lawsonia intracellularis
acgatcaacagacatacttatccagggagaaagaatatatccactactaccaattggtccatctttatacagtttaaaaaatacatacctattatttttgtataataattctgacatgcgtaatggattttcttgaatccaatttcttattaactcaatatttttattcccttgcgggataataccttgtgtttcaagat

SEQ ID NO: 5982 - DNA, 200 bp, Lawsonia intracellularis
aactagctaaactatgatactcttgtccattactgccagcaaacccaatatgtatagaagaaccatcttcaaaaactaataaacctgagccttggatatgtaaaaagtaagaatctaatggatctttcaaccatgcgacctctaatcccttacccttcaatactcccttatcatcaatttcataccgactatagtaagga

SEQ ID NO: 5983 - DNA, 200 bp, Lawsonia intracellularis
ataggccctttttctgtttgtcgatatataatatgagatcctaccaactcttttttaaataaccctaggttgagctgatgcaagtctggtggtgttttatataaaggatatctatactccttacttggtttatagcttgccttaaacataggctcataataacctaaaaaatttatatcttctgttaaacctatccactg

SEQ ID NO: 5984 - DNA, 200 bp, Lawsonia intracellularis
aaaatcctttgaaagaacttctggatgttcatctaattgatcaagtaatgtttcaagtcgattaactgtattaaaaagttgaccccatgtaattgcaatatcaccatgtgctattgccacttgctctaagtctttcttacttaaatattgatgagttgcctccaaagctggcctaagttctttccatgagcgaagatttt

SEQ ID NO: 5985 - DNA, 200 bp, Lawsonia intracellularis
gttttcttggagaaaatgtctttgcaatagctgttgcactctgttgttcttttatattataaaaaggtcttaaatttgtatatgataagccattagatgacatagattccatcaaactattgctacaaccaactatgcctaagaaacatattataatagatagatatctccatctaactaaataccttcccataatagga

SEQ ID NO: 5986 - DNA, 200 bp, Lawsonia intracellularis
ataaaaatatgcaacatacaccttctcatacaatatgttattctcaccgtgtttcttatggtgagacagatgctatgggttacttatatcatgcagaatatttacatatttttgaaataggacgtactgaatttctccgtagccttggtataagttatgcagagattgaaagtagaggcatcagattacctgtatgtcat

SEQ ID NO: 5987 - DNA, 200 bp, Lawsonia intracellularis
gcaacatgtcactatcgccatccagcccactatgatgaagtcctaaacgttcatatcaaaattaatgaaataaaaaaagcttctttgacttttagctattctgttataaacaaacattctaataagttacttactaatgggactacaagacttgcctgtaccaacataaatggacaacttataaaaattcctgaatggct

SEQ ID NO: 5988 - DNA, 200 bp, Lawsonia intracellularis
tatcaatattttctatggttctttactaatgattcccaacagtcataactgtagttaaaaataactatttattagactagaaataatgacaacttctaatataactatgtattttcttaacttaaccttcactctgctttatttaaagtaaaattattgtacttggtttatctcatcataactaatagaaattcttataa

SEQ ID NO: 5989 - DNA, 200 bp, Lawsonia intracellularis
atattatcttagtaagggttagtattaatatttaataaaaaataacaagtaacttatgctaattcaaaaaaaaaacatacgcttatatcaaaaaatatcaacttattcaaaaagttattactttagccttccctttttcaaaaatcctataagcacaatatccaacactcttagtgtaataaaaaagttggttaaatgca

SEQ ID NO: 5990 - DNA, 200 bp, Lawsonia intracellularis
aaaccaattgtatttttacagtgagcgtcagaactaaaacaaattgatacaccttgtgctttagccatttttattatttctaaacaaggatatatttccttacaaaatttacgtagccctgcagacgaaacttcaaggctcataccactatcacgaatagctatcaataactctaaaactattttttgtccttctgcact

SEQ ID NO: 5991 - DNA, 200 bp, Lawsonia intracellularis
attaatccaagttctaaatatagatggagtaaaaattttaataagatcaaagtgagcaacaacatgcataagtttactgcacaccatttcttttaaagaagaaaaatagtttttataatgcatataacactgagataatgacaagttacgccagtcttctatagtaaaatcgaaaccccaactccctaaaaaatgtactc

SEQ ID NO: 5992 - DNA, 200 bp, Lawsonia intracellularis
caccaataatatagtcaaaattatacatagaaatcactgagtccataaaaagactttcactaggtaaccagtcaatttctacacccaataatactttatgatgctcaaaaccacactttttaatatgagacacattttcaatatactgagggaaattataactcaaatgtttattatattcaataggatatgaatattta

SEQ ID NO: 5993 - DNA, 200 bp, Lawsonia intracellularis
tgtggtcttggtgcatgctcagaaaaaccttgaatgtctatgcctttatcttttgctgcataatacatttcttcaactgtatttttgccatgcgaagcacttgtatgcatatgtatatcagctagcaatagtattcctttactttcattatgtagttattaaaaaagaatctacttttatttctaaagtagattctttca

SEQ ID NO: 5994 - DNA, 200 bp, Lawsonia intracellularis
taacaaattataactattgttatatttttaaagctgtttgtaaatctttaacagcatctaattgttcccaagtaaattcaggtaattctcttccaaaatgcccataacaagaagtcttactataaattggtcttagtaaatctaaacgctttgtaataaaataaggtcttagatcaaaaacctcaagtacagcttttgtt

SEQ ID NO: 5995 - DNA, 200 bp, Lawsonia intracellularis
aagacttcatcaggaatatcgcttgtacctaaagaagatactaaaacagaaacaggctttgctacaccaatacaataagcaatttgtacttcacagcgttgtgctaatccagtaccaactacattttttgcaatataacgagccatatatgctcctgaacgatcaacttttgaggcatctttccctgagaaagctccacc

SEQ ID NO: 5996 - DNA, 200 bp, Lawsonia intracellularis
gccatgatggcctgaccccccatacgtatcttgaataatttttcttcctgtcaaaccacaatcacccatagggccaccaacaacaaaacgtcctgttgtattaatatatatttcgcattctttctcatcgaacattcctgtaggttcaagtacaggacgaatcactttactcttaacagcttcaataaggtcactttgtg

SEQ ID NO: 5997 - DNA, 200 bp, Lawsonia intracellularis
atacagaaggggcatgttgtgtagaaacaacaacgttgttaattcttacaggaaccccattataatactcaaaagatatttgtgttttcccatctggccgaaaaaaggacacttctccatcttttcgtacttttgttaatttttgagaaagctgatgtgcccaataaataggtgctggcattaacgttggagtttctcta

SEQ ID NO: 5998 - DNA, 200 bp, Lawsonia intracellularis
caagcaaaaccaaacatcattccctgatctcctgcaccttgctcttcaggttttgcacgatcaattccctgagcaatatctaatgattgcttatcaattgtggaaagaactgcacatgtctgccagtcaaaacccatctcagaactattataaccaatggactgtatggtccttcgaactacacttagcaaatctgcata

SEQ ID NO: 5999 - DNA, 200 bp, Lawsonia intracellularis
accatttgttgtaatttccccagcgataatagccatcccagtagaaactaaagcctcacaagctactctagaatgtggatcttgctctaacaacgtatctaaaacagcatcagaaatttgatcagcaactttatctggatgaccttctgttactgattcagaggtaaaaaagtatctccccttttcaatggtcatatctt

SEQ ID NO: 6000 - DNA, 200 bp, Lawsonia intracellularis
ctcccctaaaaatacaagcaaaaaactgtatcaaaattataaattcattatataattttcttgtgtttaacgttaactatattaacacaataaatataataagtaacaatagaatattgctatcatgtatgattagactatgtccagaggggctcataaactaaaataaaaaaccaatctaactttaaataaatactatt

SEQ ID NO: 6001 - DNA, 200 bp, Lawsonia intracellularis
atgataaaaaaacctgtttaccaaggacaaattgacgttttttgtgctgcatatgcagctattaatagtattcgaattgcccaaggaataaatttaattaatgcacgcaaactattacatgaagctttacttaatgttgctaaggatcttgaactattccaaaaagttcttgatcaaaaaacagattatgtattttgggt

SEQ ID NO: 6002 - DNA, 200 bp, Lawsonia intracellularis
tgataacatattagaacaagagtcaaaacgtggttctattacagtaaaaaaagcattccctcatgcgactgaaaaactggataaccatatcactagcgatgatgtttggtgttctattataaattggctttctaatggagaaaaacgttcatgtctctttcagtttattcgctatttacctacaaaagggttatttctcc

SEQ ID NO: 6003 - DNA, 200 bp, Lawsonia intracellularis
aacactggacatgtggctataacttactatacaataatacattacttctctttgctgattcctcattagagccagactctctccaatatatatacaaaaaggaacttggcactacttttaaaaatcttcatgatgaagtaataattaaaccatatacgttacgtttagtagaaccaattctaatctcttaaaaaccttga

SEQ ID NO: 6004 - DNA, 200 bp, Lawsonia intracellularis
taataaaggtagaaaaatatatgcaagtaatacgagcaaaaacagcagggacatgttggggtgttgatcttgctttacgtaaactttctcagtctattgaaaataaagaaaaagctaatacacgttttgtcatgtatggacttattatccataatcctcaagttatagtagaatataaggctcaaggagttatatgtgtt

SEQ ID NO: 6005 - DNA, 200 bp, Lawsonia intracellularis
gactctattgaagaagtccgtgctggagatactgttattataagagcacatggaattcctatctatgaagaacaacaactaactgacattgggattaacctcatagatgccacttgtccaaaagtaaaaaaaactcaacttgcaattgcgaatgcaactaacagtgaaacaatattacttctctttggtgaagcaaacca

SEQ ID NO: 6006 - DNA, 200 bp, Lawsonia intracellularis
ccctgaagtaaaaggacttatttcctattctcaaggcccattccatgtttttgacacaaaacaatttgttgaagactttgataattctcaaaacaaaacaatagttctcgcctctcaaacaacacaagatgaaataactttcaaagaaatacaagaaatactccatcaaaaaggaatacaacctgtaattcttaatacca

SEQ ID NO: 6007 - DNA, 200 bp, Lawsonia intracellularis
tatgtgatgccacatataaaagacagagagaacttctttctattacagaacaagtgaatactatggttgtagttggtggatttactagtggtaacactcgtagacttgttgagctatcaaaagcaaaaggaatcaaaacatttcatattgaaacagtagatgccctttatggaaataatgaattagatcaaaatgatatt

SEQ ID NO: 6008 - DNA, 200 bp, Lawsonia intracellularis
attggactcaccggaggagcatctaccccaaaacagcttattgataaagtggaagatttccttagtaataatctaagttaatcccataaaaaaagtagatagattatacccattctttacttggaagacataagttggaggcaacatgtcacaaacaggtattcttcttgaatctggaacaaatgaactagaaatagtag

SEQ ID NO: 6009 - DNA, 200 bp, Lawsonia intracellularis
aattttttcttgatgaggatgatgacaatggagaagtgtatcgaggatattatggtgtgaatgttgctaaggtacttgaaattattagaatgcctaaagtgacagaactacctgatactcaagatgagtcgatacttggagcgtttaatttacgctcacatgttattccccttgttgatctaggtcactggcttgggaaa

SEQ ID NO: 6010 - DNA, 200 bp, Lawsonia intracellularis
aaacttgcaaaaacagatgagcccaaaaaagttattgttacagaatttaatgacgtaacaacatcttttatggtctctggagtgaatagaatccatcgtattagttgggatgaagttgagcccccaaatgactatgtctctcaagtttctaaaacaaccattactgggattataactattgaagatcgtattgtttttat

SEQ ID NO: 6011 - DNA, 200 bp, Lawsonia intracellularis
tcttgatctagaaaaaatagtagctgaacttaaccctgcattaagtctccgacttgatgaggctgtaacatggggaagcgaaattcgttaccgtgctctaattgcagacgattcaaaccttatccgtgaaatgctcaaggatttgatgcaaaaagcaaattttgaagtcgaagctgttaataatggccgtgaagcatggg

SEQ ID NO: 6012 - DNA, 200 bp, Lawsonia intracellularis
aacgtttaactgaacttaaaaatagagctactgaggaaaataaaaatattactgactacgtacaagcagttataacagatattgaaatgccaagtatggatggacttaatctttgtaaaagaataaaagaagatcctcaactacgaaaacttcctgttgtacttttttcttcaattattacagataaacttcgtcataaa

SEQ ID NO: 6013 - DNA, 200 bp, Lawsonia intracellularis
ggaattgatgttggtgcagacgatcaaatttcaaaacctgaggtcactcatcttgctaaacgtgtatatgcccttattgctgaacgacagagctaaccattcaactagatactatcctttaccataccttttcccatactaaaaaaaaaaaaaaatcatttcccatatccaatacaataataggtaaaaccacattgcct

SEQ ID NO: 6014 - DNA, 200 bp, Lawsonia intracellularis
cataaaggaaggagagtaaagattacgtccatcaaatattacaggcatgttgagcaatgttttaattttttcaaagtcaggattacgaaactgattccactctgttacaataagtagtgcatctgaattattacatatagtataaggatctgcttcaatactcacaagcatattatcatgaagaacagcttttgctgtgt

SEQ ID NO: 6015 - DNA, 200 bp, Lawsonia intracellularis
cataggcaacaggatcaaatgcacggatatacatacctcctgctgtcaaattattaataattgctattgctggtgactcacgaacatcatctgtattagctttaaatgcaagcccccataatgcaagtgtcttacccttaataccactctggccagaaaaatattcctgaatctttacagccattgaatgtttctgacga

SEQ ID NO: 6016 - DNA, 200 bp, Lawsonia intracellularis
tcattcacaacttctactgcctctaacaactttgaatctataccaatttggtttgctgtatgaataagtgccttaatatcttttgggaaacatgaaccaccatagccaacaccaggataaataaaatggtacccaatacgatgatctgcaccaatacctttacgcacttcacgaatatcagcacctaatttttcacacaa

SEQ ID NO: 6017 - DNA, 200 bp, Lawsonia intracellularis
taaagccatttcattaataaatgaaatctttgtagctagcatacagttagctgcatattttgttagttctgcactccgtacactcattacaataagcttctctctattccgtgcaaacggtgcataaagcttatgtagtaaatgtgctgatgattcagagtctgtcccaacaataattctatccggcttcataaagtcag

SEQ ID NO: 6018 - DNA, 200 bp, Lawsonia intracellularis
caatggcatcaccttctttaagaaattctggattagaaacaacatcaaaagacagttctattcctcgagtcttaagagcttctttaactaatattcgaattttatctgctgtaccaacaggaacagttgatttatttacaataataagaggagaactcatacattgacctaatgatgatgcaacatgttctacataagat

SEQ ID NO: 6019 - DNA, 200 bp, Lawsonia intracellularis
gtatcacatgtaccttcttctgtagaaggtgtccctacagcaataaaagcaacttctgcatctttaatccctgtactcaaatctgtagtaaaatataatcgcccttcagaagtattccgtttaactaaatcagatagcccaggttcaaaaatatgtatcttgccatgacaaagcccttcaattactgctgggttaatatc

SEQ ID NO: 6020 - DNA, 200 bp, Lawsonia intracellularis
tacgcaataaacatgattacccatttcagcaaaacaagcagcacttaccagtccaacatatcctgttcctattacacaaatatgcatgaaatactccttcagtaccctttatatccataggtattgcttgtaaacagatgcaaccatatcgtcaacttgatcttgtataatacaataagacaagctatataatctttatg

SEQ ID NO: 6021 - DNA, 200 bp, Lawsonia intracellularis
ttatattactatagaggtattatatggctatcattggcttaggaatggatttggtagaaattttacgtataaaaaaaaccttttctacatttggtgatgtatttctctataaaatttttactagtattgaatacaataactttttactaaaaccttctatagcatctctagctgcaagatttgctgctaaagaagctgcc

SEQ ID NO: 6022 - DNA, 200 bp, Lawsonia intracellularis
tcaaaagcgttaggaactggttttagtgacgggatcacattcaaaaatatagaaatttcttctttacccaatggtaagccacagctacattttcaaggcaatgcaaaaaaaaaagctatctcccttggtgttaacaatataatgattacattaacacatagtcataatacagctggtgcggtggttatattagaaacata

SEQ ID NO: 6023 - DNA, 200 bp, Lawsonia intracellularis
aaaaatacaacttaaaaaggaaacaagatggaaattcgtggaacaactattcttgctgtaagacataaaggtcatgttgcattagctggagatggacaagtcacattaggtcaatcagttgttatgaaacatacagcaaaaaaagttcgtagaatgtataaaaatcaagtaatagctggatttgcaggtacaacagctga

SEQ ID NO: 6024 - DNA, 200 bp, Lawsonia intracellularis
tgctttcactttatttgaacgttttgataactatttggaagaaacaaatggtaatcttgttagagcggctgtagagcttgctaaagaatggcgtaaagataaatacttacgtcgccttgaggcaatgttacttgttgtagataaagatcatacatttgtactaagtggaactggggatgttattgagccagacgatggga

SEQ ID NO: 6025 - DNA, 200 bp, Lawsonia intracellularis
ttgcagctattggaagtggcggattgtatgctgtggctgcagcaagggctttagtcgctcatagtgagttaagtgctgcagaaattgctcgtgaaagcatgcgtattactgcagaaatatgtgtttttaccaacttaaatcttaccctagaaactttatagtgattaaaacagtataacaaaataatgtaatatacctaa

SEQ ID NO: 6026 - DNA, 200 bp, Lawsonia intracellularis
atcaacattattataataatataactaatatccttctatcactaaaaatttagtatataactatatacaaagatagttatatgtttgtattatttatttcattatataataaatcattgaaatgatacttatttcatagaattatcctcaatataatatcagctactattatttatattattatttaatagttcgaaata

SEQ ID NO: 6027 - DNA, 200 bp, Lawsonia intracellularis
catataactattaatatactacaaggatgatatgaaaaaacttcttatagtattattagctattatagtatgttcttatagctatactcatgcaaagatggaacctcttatagaaggtgtcatcaaacgtggtgtgcttcgtgtaggatttgctccttttttaccatggattatacaaaataaagatggtgaatacgtag

SEQ ID NO: 6028 - DNA, 200 bp, Lawsonia intracellularis
gatttgatattgatatcgctaaaagacttgctcaagatttaggtgtaaccttacaactagttccaacaagatggacagaaattatcccatctctacttgcaaacaaatttgatataatcattagtggggctacgataactcttgaacgtaatcttcaagtcaatttttctaacccataccatcaaacagatattgaagtc

SEQ ID NO: 6029 - DNA, 200 bp, Lawsonia intracellularis
ctggctaatgcaaaaaaagttaaagggatgaagtttccacaagactttaataaacctgaagttatagttgctatacgtaatggtagtacagttattactcctgcaaagcaacttcttcctaaagcatcttttagactctttgatgatgaagttgcatctataaaagatgtagaatctggacaatcacatatattattagc

SEQ ID NO: 6030 - DNA, 200 bp, Lawsonia intracellularis
ttcagcaccattaccagcgattcaagctataaactcaaatggcaaccttattcgtttagatacactccccattactcatcaatctgtaggatttgcaataaagaagggagatccagatagccttaacatattaaataattggattaaattcatagaaaatgaaggttggcttagcgaaagaaaaaactattggtttaatt

SEQ ID NO: 6031 - DNA, 200 bp, Lawsonia intracellularis
ctctaaagtggaaaaatgaagttatatgattactttcttattgttaattctcaaaaaatactatatattaaaactagattattataatattctttaacttgtaacctctattaaagtaaagctttttacaatactaaaaaatagtaacactaccctgacaatcttactaacccaataacaaattatcatgaaatggttta

SEQ ID NO: 6032 - DNA, 200 bp, Lawsonia intracellularis
cacataaagctattgctattgcaggggctttagctcttgaagcttcgcctcctggactttttgctacacttgtaggaagtatcttacctgatcttgcagataggacctttgctatggggaacaaacagcaatggagacgtatacacagacagacctcacattggatgggatggtatctactcttaatgattttaggacta

SEQ ID NO: 6033 - DNA, 200 bp, Lawsonia intracellularis
atgaattttccattaaaacattttgcattatcaccaatagcaaatcaacttttttcagaaataatgttatgggttgggtttggaggtattacgcatgttcttctagatagcctcacccctatgggtatccccatgtggccatttggtagtaaaaagcgtattgggcttagccttatatcaactggcagtgttggtgagct

SEQ ID NO: 6034 - DNA, 200 bp, Lawsonia intracellularis
tgtatttcttattatttcaattagttgtattatatcacagtataattggtcaaaaatgttatccaaataaagtgtagtaatataagtagtaagttaattcaatcaatttttatcattgtcataatgattttattttattgtttagaaaagctatcgttatatattaattatgatttattctcacctttctagtaccagtt

SEQ ID NO: 6035 - DNA, 200 bp, Lawsonia intracellularis
gtacgattactactggatgtaaagtaaatcttaatctatatattacaggaattcttcctaatggttggcataaaatagactctatttttctaccactatctgaacctcatgatgaacttcatattgaaataactaatcataaccaagggcttcatctttcctgcaatattcttgatattgagttagagaataatattctg

SEQ ID NO: 6036 - DNA, 200 bp, Lawsonia intracellularis
acaaaaacttataccctttttactaaggctacacattttaccccttctatttctatatatttaaaaaaagggatcccttatggagctggtcttggtggtggtagctcagatgctgctgcattactaacttggttacaaaaaaatagtccacttcccttatctccatcaaaactactaaaacttgctgctgagattggtgc

SEQ ID NO: 6037 - DNA, 200 bp, Lawsonia intracellularis
agatgtcccattttttcttaaaaataaaccttgtcgagctactggcattggagagaagttagaagaaatctctctttctaaccttaatatttcaggcaatacgctttttattatttgtccaaacctaaaaatttcaaccccatatgcatataaaatgtgggatgattataataaaaaacagatagctacctcctcacgtt

SEQ ID NO: 6038 - DNA, 200 bp, Lawsonia intracellularis
ataacaataacttgacaaaaaaatactcttgggatagaagctcaccatccacccatctgtcagactacttgtggatgaaaaatgattttgagccagttatcttttctgaatacacagaattaagtgtattcaaagaacaactccttcagtttggagcgcgagctgctgtactaagtggtagtggatcatcaatatatggc

SEQ ID NO: 6039 - DNA, 200 bp, Lawsonia intracellularis
ttatttaaagaatataaccagacgtcaattatgactgagttttataagaaaaaaaatattttaacattcagtcagttattgcagtagatattttaagaacaacttagttaaaaagttggggtgtcgccaagttggtaaggcaacgggttttggtcccgtcattcgagggttcgagtccttccgccccagccatttttatt

SEQ ID NO: 6040 - DNA, 200 bp, Lawsonia intracellularis
aatggctataaagccaaaggccttcagttttatgtatggtgagttaaaaattctttcaggaacagcaaaccttcctcttgcacatgctatttgtaacaacttaggatgtcccctcacaccatcgctctgtgaaacatttagtgatggagaaactcgaattgaaattaatagtagtgtccgtggtggtgatgtatttgtca

SEQ ID NO: 6041 - DNA, 200 bp, Lawsonia intracellularis
ttcaacctacatgtgatccagtcaactataatttaatgcaattatgtcttatgcttgatgcgcttaaaagagcaagcgcaacccgtatcacagcagtaataccctattatgggtatgccagacaagatagaaaagttaatccacgtgcaccaataagtgcaaagttagtagctgacttcctttctactgcaggtgcaaat

SEQ ID NO: 6042 - DNA, 200 bp, Lawsonia intracellularis
cgtattgtgacagtagatcttcatgcaggtcaaattcaaggtttttttaactgccctgtagataacctctttgcatcaaaagcattattagagcctttctttagtatgaaagatgaaattgttgttgtatccccagatgctggaggtgtcgaaagagcacgtgcttttgctaaaaaaatcgaagctccccttgctatcat

SEQ ID NO: 6043 - DNA, 200 bp, Lawsonia intracellularis
tgataaacgacgagataatccaaatcaagctattgccaccagtgtaattggagatgtaaaaaatcgtattgcaatacttgtagatgatattattgatactgcaggaactataactgctgcggctgaactccttcttcgtgctggagcacgtgaggtaaacgcaacagccacacatggcgttctttcaggacctgcaattg

SEQ ID NO: 6044 - DNA, 200 bp, Lawsonia intracellularis
aaaatctaaatcgctctgtatttaccaaagtactagttacagatactatcccaatacaagataaaaacaaagaatgctcaaaaatacatgtaatttcagtagcaggtttattagcaacagctatttataacattcataatagctcttctgttagcgttcttttctaacaatcaactataagataatcaaaggtatgatca

SEQ ID NO: 6045 - DNA, 200 bp, Lawsonia intracellularis
aggagttcctatggataacttaaaaacacttgtagttcaaaaacgtttagatcttgggaagggtccaaatcgccgtctacataaaaaaaacttaatcccagggatattctacacatctagtggtaaaaatattcctatacaactccccgagcttccctttaccaaaatttttagtgaagtaggacgtactacagttttta

SEQ ID NO: 6046 - DNA, 200 bp, Lawsonia intracellularis
atctaaaaattgaaagtgataaagaaaacatcacgcatcctgttattatctgggaactacagtattatccagtaaaaaatcgttttatgcatgtagacctttatggtgtagagcttaataaacctataaaaattgtagttcctcttgaattcactggtactgctaaaggaacaaaagttggaggaaaacttgaaacatat

SEQ ID NO: 6047 - DNA, 200 bp, Lawsonia intracellularis
agagaacagcttacccttattgcaaacccacttgatataccctcaaaaattacattagatatttctgatttagatataggtaaaagtatatatgtagcagatttaaaactcccagaaggtgtcaaaacttcttatgacactaactatgctatagtatctgtaataatgccaggtgggaatactgcaacagaacaagaagg

SEQ ID NO: 6048 - DNA, 200 bp, Lawsonia intracellularis
atagctatctttcacagtttatatactgatctgatttataaccattatcatattaacacttgtttaatacttactaaacatgagcattaaagggattattgcaggtcttggtaaccctggaggacaatatgaaaagacccgacataatattgggtttatggttattaataaacttattactataacatcagcaagtaaac

SEQ ID NO: 6049 - DNA, 200 bp, Lawsonia intracellularis
tttctggcaaaaaattttattgtgaattatggaaaacaacaactataatagataattatctattagctaaaccacaaacatatatgaatctatcaggagaagctatccatcccctagtagaatggtataatataaccaaagataaccttttagttatccatgacgaactagacttacctattgggaaaatgaaacttcaa

SEQ ID NO: 6050 - DNA, 200 bp, Lawsonia intracellularis
caaggtggaggaactgcaggtcataatggactaaaatctattattcataacttaggaaccaaagatttttatcgcctccgaataggcattggtcgttctcctcttccctctgaaaatacagtaaactgggtccttggccacctttctatgaaagagcttactactcttaacaatctcttccctacaatttttgatgcact

SEQ ID NO: 6051 - DNA, 200 bp, Lawsonia intracellularis
ctccttctttatcaaagatgagaaagagacagctataagaatgattaacagttttactcttagtgaaacagttaacttaagctaatctattaaaaaatttactattacttcttttattctataaagctacacaaaaatattaactcataagcctagaaatctctattcgaaaaaatttgaaaattttatcttttatttat

SEQ ID NO: 6052 - DNA, 200 bp, Lawsonia intracellularis
tcagttgctataaaagattactaaattagtaattttttatttactaacattaataataagttgtaatagagtatttactcaatgttaatgttaagttaattttaactagttatatttaatctaatttttattagtttcttatgaagaattcttggccgcttataatatccattagctttattattcttataactggttgt

SEQ ID NO: 6053 - DNA, 200 bp, Lawsonia intracellularis
gcaacaaaaaccatatgtatcatagatcaacaagaattttctgtaatgtatcgtcaccttgctccattattatggaataaaaatgttgttgataacaatggctattatcaggaacaaataaataaaaaactatcccctaagataggagaatatttatttcaacatcttccagtaaaccttacctcacctacaactaaaac

SEQ ID NO: 6054 - DNA, 200 bp, Lawsonia intracellularis
taatgtattaacatttgcacaatcccaaaatccatatacaaaaattactataactcattatggattttcatttcaagacaacaaacggaaaatacaaattaaacttattgctcaaactgactggttcaacaaaggaaataatgattggataatattataccatgttcactcttctaatatttctacaaattattatctta

SEQ ID NO: 6055 - DNA, 200 bp, Lawsonia intracellularis
ttctacctcatcctaaggaaagtttacctattgagccacaattaattgctatatgcgatgagctaaataatacttgtacaataataaatgataattcaactaacattcaaaactttggcacctcctattttgaggtagaaccagagatttactctatcatttcaagtccaaaaaaacaaaatatacaagaaaataaagaa

SEQ ID NO: 6056 - DNA, 200 bp, Lawsonia intracellularis
acaacggttactataaaccaattacaaaaataattcttggtataacttttgctagtttctctatagagaaataatatcctaataacctagtaaaaatactacaactaagctaattaaagatatattttaaggtataaggtttgcatattctcatcctgtactcaaaaaaaggagtaagcaccatgcaacaagctaaattt

SEQ ID NO: 6057 - DNA, 200 bp, Lawsonia intracellularis
agtggcttatttgctgcattaagtgcagaacacaggatgaacttcattgccaataacttggctaatgtaaatactgcaggctataaacaagataaacttgcatttaaagatacaatgatccaatttgctcacgatcaaattagagaaccaatagccactgttcgctcaaaaccactattccctgagccaaataatgctgc

SEQ ID NO: 6058 - DNA, 200 bp, Lawsonia intracellularis
aagagttcgtattgctgtttctaatacagactttgcccaaggaagcatgcagtttacaggcaatccattagactttgctattacaggagagaatggatttttccggattcaatcacctcaaggaaactatctcacccgtaatggttcatttgtccttgatgcaacaggacaactagttactaaacaaggatggcctgtat

SEQ ID NO: 6059 - DNA, 200 bp, Lawsonia intracellularis
tgggagatggtggaccaataactataccagaaggaacaaaaaaaatctctattactcctgacggtagaatttttgctgatgatgcagaagttggaacaattcaatttgtttctttagatgatgtaaaaaaacttgaaaaagttggcgcaaacttatatcgcccaaaagaagggttagaaattattgaaggaaatgctaat

SEQ ID NO: 6060 - DNA, 200 bp, Lawsonia intracellularis
gaaacaggtgccattatcaatcaaggatttttagagagctcaaatgttaatgttgttgaagaaatggtcaaaatgattgaagttaatagacaatttgatgcctatcaaaaagttatgcaaacttctgactccctcgatcgtgaagcttattcaaaagtaggtcgtactagccgataaggggaaataatactatgatgcgc

SEQ ID NO: 6061 - DNA, 200 bp, Lawsonia intracellularis
tctctttggacagctgctacaggcatggtagcacaacaacttaatattgatgttatatcaaataaccttgccaatacaaatacttctggttttaaaaaaagtcgtgctgaatttgaagatcttatgtatcaaactatgaagattgcaggttcagctacagatggagataataggattcctgtaggaattcaggttggtat

SEQ ID NO: 6062 - DNA, 200 bp, Lawsonia intracellularis
gggagttcgccctacagctgtccataaattttttacacagggggacttccaaaacacaggtaatcctctagatatggctattgaaggcgaagggtttttccaagtattggttggtgatcaattaatgtatacaagagcaggtgcttttaaacttaatcaggatgggactcttgtaacagccaatggataccccctacaac

SEQ ID NO: 6063 - DNA, 200 bp, Lawsonia intracellularis
cagaatttacagttcctcctgatgctaaatctgttgctatttctgaaagaggtcgtattactgctttagacgcaaatggacaagaaatcgctgctggagaaatacctttatatagctttgttaatccagcgggactggatgcaaaaggacgtaatctctatattcccacagaagcatccggtgaagcggtagaaggtgtc

SEQ ID NO: 6064 - DNA, 200 bp, Lawsonia intracellularis
cctggtgaagaaaacttagggactatagctcaaggattccttgaaatgtctaatgtagaggttgttgatgaaatggtacaaatgattgtaggacaaagagcatatgaaatgaattcaaaagcaatccaaacttcagacaacatgcttcaaactgcagtccaacttaaacgtagttaatcctatgagataaaatactttta

SEQ ID NO: 6065 - DNA, 200 bp, Lawsonia intracellularis
agatgaaatacattcgtcttctattattcacacactgtattgcttttatttttcatataactatagcacataattgtgctgctaactctcttggatcagattggcgtattcatattaaagaagcttctgttgtccatggggatatggtcacccttgctgatatagctaaagtatatgggacccctcctccaggagtttgg

SEQ ID NO: 6066 - DNA, 200 bp, Lawsonia intracellularis
gaaaaaatttcttccatacccttatgggaatctccagaaaaacctggtgtaccaatgaaaattaacagggttaggctagaaaaagcattaaaagagacccttggagaagcctcttttttttctgttataccttctaatgtagctatacaaaaaggtggagagattctttatgagaaccaacttcaagaccttacccaaaa

SEQ ID NO: 6067 - DNA, 200 bp, Lawsonia intracellularis
agctattaaaaacgtatacccaatgttagcttctcatggagaactctcagattaccgtatcccagcatatatttttattcctcaaaaaggtcaatatgtagaagtagtactacctactatttctcctaagagattgtctctacagtttgttttaaaagatattgatggaactgtattacgtcaatatactggcactgtgc

SEQ ID NO: 6068 - DNA, 200 bp, Lawsonia intracellularis
ttttaagcgtttggcagcctgtcccttcagttgggaaacctctaaatagaggtgattatgtaaatcctgaagatgttacatggattaataaaaacattgcctttttaagagatgatatatgggatggcaaaggaggtccttggcaaattaaaagatctattggtattggacagcccatctatcaatctgaccttgaacct

SEQ ID NO: 6069 - DNA, 200 bp, Lawsonia intracellularis
ttagctgttgtacgtaaaggagatattataaaacttaattacaataaaggatcaatacgtcttagcgttaatgttgaagcccttgaaaatggaacacatggctcttttatccaagtacgaaacttgcaaagtaaaaaaatagttcatgctactgttgtagattctaatacagtagaaatacgctaacgtattggaaaccc

SEQ ID NO: 6070 - DNA, 200 bp, Lawsonia intracellularis
attatgaaaaaattactctttacttcaggctgtattcttattttaacaggttgttctgctccaaacaaaactcctgttgttgctcctcctataacacctcctccagcatatgtagaacctgaagactcctatagtaatcctggctctctttactcatctgctgaatctgatggtctttttgctgatactcgtgctcgacg

SEQ ID NO: 6071 - DNA, 200 bp, Lawsonia intracellularis
tgtaggtgatattgttatggtaaaaattgtagaaaataatactgctaaaaataaagcagatacaacagctgataaaaaaactgcaaatacatacggaattgatgcgttttttggtagacaatatattggtggaggatcaacaaaaattcctgtaggtagtgttgcttttgatacaacctctgaaagtggaaccactagta

SEQ ID NO: 6072 - DNA, 200 bp, Lawsonia intracellularis
caggagaaacaaaacgtgaaggagctataaatggaacaattgctgctcgtgtattacgagttatgccaggtggattattagaaatagaaggcgtccgtgaaacacgtgtaaataatgaaacacagtatattgttatcacaggacttatacgaccaatggatatagagccagacaactccattatgtcaaatagaatctct

SEQ ID NO: 6073 - DNA, 200 bp, Lawsonia intracellularis
gatgcaaaaattgcttattatggtcaaggtgttctttccgagaaacaaaaacctggttggtttacacgctttatggataccctctggcctttctagtagtctaatatactaagtataactcaatatctataaggtaaacgtatgttatcttctattatcagacctactaaaaattgcctactacactttattatacgttc

SEQ ID NO: 6074 - DNA, 200 bp, Lawsonia intracellularis
ttcctatcttacattattatttattgctgtatttcataatccagcacaatctgttcggattaaagatattgcaacattctctggtgtccgtaacaaccaacttattggatatggtcttgttattggactcgctgggactggagataaaagagactcaccttttacagcaagctcaatgacaaatatgcttgaacgtatgg

SEQ ID NO: 6075 - DNA, 200 bp, Lawsonia intracellularis
gagttgctgtcgatgctaacaaaattaagcctaaaaatgtagcagctgttatggttactgcaaatatgcctgtatccgcaagacctgggacagagcttgatgttacagtttccagtgtgggtgatgcaaaaagccttcaaggaggtgtattattacaaactccactaaaaggtgttgatggaaaagtctatgctcttgca

SEQ ID NO: 6076 - DNA, 200 bp, Lawsonia intracellularis
caaggttcacttatcattggaggatactctgctgaaggaactgcagctagcgttcaaaaaaactcaacaactgtaggctctatccctggaggaggtattgttgaaaaaggtattccttttgactttaatactcaacaaaatctaacacttaatatgaatagcaacgacttttctactacaatgcaagtagtaaaccgttt

SEQ ID NO: 6077 - DNA, 200 bp, Lawsonia intracellularis
aaatgctactatgggagggaattttgcctcagcaatagatgcaggaactgttcgtattgatattccgccagcttataaaggaaatcttgttccattaattgcttctatagaaaatttagaaattaatcctgaatctgtggcaaaagttgtagttgatgaaaaaacagggactattgttcttggacgtgaagtgcgattat

SEQ ID NO: 6078 - DNA, 200 bp, Lawsonia intracellularis
cacgtgtagctgtagcacatggtaatctccaagttgttatccaagaaagcgcccaagtttctcaacctggacccttcagccaaggacaaacagttataacacctgaaactaatcttaccttacaagaagaaactaaaaggctcaatttgttagaaggagcctctctacaagaacttgttgatggacttaatgctattggt

SEQ ID NO: 6079 - DNA, 200 bp, Lawsonia intracellularis
gctacaccacgtgatatgatttctatcttacgtgcattgaaagccgcaggttctctccatgcacaactggaggttctataaccatatgattaatcctattgatccttctttagctcaaaattcagctgaagaacaaaacttaaaagaaataaaacgtaaagcagataaagaaatacaaaatcttgatccaaatgctgctg

SEQ ID NO: 6080 - DNA, 200 bp, Lawsonia intracellularis
cagctaaagaaaaaaaacttcgtgaagctgcagaaggatttgaagctatctttattcaacaaatgtggcaaagtatgcgtgcaagccttcctaaagaaggtataatgcatagtcgtgaagaacaattttggcaagggatgtacgatcaagagttaggcaaaagtatggcttcagctggagggattggacttgctgatatg

SEQ ID NO: 6081 - DNA, 200 bp, Lawsonia intracellularis
atgatggctcaactatctaaaaaattagaaaatgctagtgaagttacagcagaaagtatgcatcgaacaccactagatataaaaccagttccacttattgaagaaaaagcacctcaagaactaaaacctactaataaaaaactagaacatatctataatggcgaattaagccaacataactcttctataaaaaataatac

SEQ ID NO: 6082 - DNA, 200 bp, Lawsonia intracellularis
aaaaccttctacaactactaacacacttacacctgttgaagaagctctaaatgaattttctaagcaaataaaaacaccttcttcaacacctacagaaaatataacatcttcagactcaaatacaaaacctcctattatatctaatacagttactatcccaaaaaattaattaaccttagacaaataagacctcttatata

SEQ ID NO: 6083 - DNA, 200 bp, Lawsonia intracellularis
aaaactactttcctctttttataaagagtagtcctttatctggcataaaagctgatttgtaactccttagacaggagaaatataccaatatttataactactattaaatattatttggtataaaagctgcattatttataactaggcaaaaaagatctttttttgtcggcacaaaatgccttgtattacattgttgaaca

SEQ ID NO: 6084 - DNA, 200 bp, Lawsonia intracellularis
aaaacagctttctaatttataggagattacttatgtatatgatcatacatggcagtcttgatcgacaaaaaaaaggacttgctctattacaagagttattaaatgaagaattttctttattaatggatagaaagacagaagaaattatggcattagaattttctatccactctttattacgtcagcttgctggagaaaag

SEQ ID NO: 6085 - DNA, 200 bp, Lawsonia intracellularis
atttttatacagaaacggcttaatggaggcaaacttcttgactatgcagaactattatcagaccctgaacaaactaaagccattaagcagttatggcaaaatattgacacacttgaacaagattgttcccgtcaggcctcactaaatgcagaactttcacttgcattgcttgatcaaagtaaaaatttactttctttctt

SEQ ID NO: 6086 - DNA, 200 bp, Lawsonia intracellularis
gcataaaaatgttcaacctcaagaaactctatctacatatggacgatcaggaacctataatcaccattcacgtcctgagggcacccttctttctgggagattgtaatgtcgatcaatacacttttcggtattgggaaaagtgcaatagctggaaaccagacagctctaaacgttactggtaataatatagcaaatgttaa

SEQ ID NO: 6087 - DNA, 200 bp, Lawsonia intracellularis
tacacaaggatattcccgccaaagtgtacgcttcgaagataggtatggacttaatcaaactccaggaatgcttgggcagggtgtccatacagctgaaatataccgcaattttaatagatttgtagaagatgcttaccttaatcgtttttcccaaaatactcgatgggacgaacaaagtgctattatgaactctatagaaa

SEQ ID NO: 6088 - DNA, 200 bp, Lawsonia intracellularis
gcatttttaacgaatcaaaccgtacaggaattagttcactactaggagaattttttaaaggatggcaaaatctttccttacgtccagaagatgcagctactcgtgaagcagtgctctctacagctaaaaatctcacacaacttattaacgatgcaaaatcaagtctacaaaaaacccaacaagaaatggatctctacatc

SEQ ID NO: 6089 - DNA, 200 bp, Lawsonia intracellularis
caacaaagtgttaataaagttaatgagttagtagatgctattaaaaacattaataaacaaatctcagcaacttatattcctggtcaacaaaaccctaatcaattacttgatcaacgagatcaacttgttcgagaattagcaaacctggtagatatagaagtaaaggataaaggtggaggaaattttgatatacaattaaa

SEQ ID NO: 6090 - DNA, 200 bp, Lawsonia intracellularis
atctggacaacctctcctggaaggacaaataggttatacacttagcgttgggggacaacgagttgaaaactatttaaaacaagattcaaaatatacaggcactataacctctagtggttcagactcccatgaatattcatttgaaattattaatcctccttctggtggagcacctgggagtatgcgtgtatcacttgatg

SEQ ID NO: 6091 - DNA, 200 bp, Lawsonia intracellularis
gaggaaaaacttggcttcgtaacgaagatggatctgaacttaacgtacctattcctactacgcctggtgaaactatcaaagtaaaaaatcttgaaatatcttttgatcaagatccttcgcaattagtttcaggagacaggtttgatgttattccaaaaacaggtttatactggaattcacccacaagacctccgatcaat

SEQ ID NO: 6092 - DNA, 200 bp, Lawsonia intracellularis
attactccccaaacactaaatgatggtacagaaaatacagggcgtctcactggaggaaaacttactgcatattttagtactcgtgattataatgcaggaagatatattgataaacttgatgcattagcaaactctattgtatgggaagtaaaccgaatccacagtcaaggtgctggagaacaaaaaatgacttactcttt

SEQ ID NO: 6093 - DNA, 200 bp, Lawsonia intracellularis
agggagtagtcaagtaaatcgtacagatgtaccactgggaacatctcaatctggtcttgcctatggaaaccgtcttacaactgggaacttatcattccaaatctatgatgaaaatggaaaacctttacctgtaggcacacctccaaatggaatcccagaatctttagatcttgatccaggtacgcctggagttcaaaact

SEQ ID NO: 6094 - DNA, 200 bp, Lawsonia intracellularis
ttgatccttcaattcatagtcttgaagatctagttaatgccattaaccaccctaataactatggtgaatttatgaaagcttctattgttaatggaagtctccaacttaccagtcgtcctggaacatcatttgcagcaaaaacagatacaacaggtttacttgcagcccttggaatcaatacttttttccaaggttcagat

SEQ ID NO: 6095 - DNA, 200 bp, Lawsonia intracellularis
gctacagatatggctataaaacctgatgttattcaaaatacaaattttattaatgctggaaaggttaatgctaatggtgaagtttctacaggtgataatagtatagctaaagaacttgctgaccttgctacaaaagaagtaacaatttctactggatgggaaactacacaccaaacattaggtgcttattatggtgcact

SEQ ID NO: 6096 - DNA, 200 bp, Lawsonia intracellularis
agttggtcttgtaggatctgatactcgtacagcaaaatttaatgctgattataataaaacactttcaaacgaactagaacaacaagctttatctattacaggcgttaacctagatgaagaaatgactcagcttattaaatttcaacattcatatactgcagcagcaaaactcattacaacagcagatcaaatgctgcaaa

SEQ ID NO: 6097 - DNA, 200 bp, Lawsonia intracellularis
ctttactttctttaaaacagtagggagtaaacatgagggttacccaccaatcaatgtattctggcatgatcagtcagatgaacaaaagtttatctgactatatggagactaatatacaaggcggtacaatgaaaagaataaaccgtccttctgatgatcctgcaggtacagctagaatcctctcttatcgtggaagtatt

SEQ ID NO: 6098 - DNA, 200 bp, Lawsonia intracellularis
ggtggaatagaacaatttaaaacaaatactgatacagctatgggatggttatctcttgcagatgaaacacttaatcaagtttcaacagttgttactaaaattaaagaacttgccgaacaagctgctacagatacatatacccctgaccaacgtgaagctattggtttccaactccgccaacttatgggaactcttataaa

SEQ ID NO: 6099 - DNA, 200 bp, Lawsonia intracellularis
cctttcaaataatcaatttgaaggcaaacatattttttctgggcaagattataataaatcatcctttctagaaggactcacagtcacaagcggagatcccaatgttaaccctaatccaccaatgcaggttactggaacacttgaaaaaactggacttattcgctttgaaaaagatgaaacaatccctccagcagcagatc

SEQ ID NO: 6100 - DNA, 200 bp, Lawsonia intracellularis
taaattatcagtggtcaactgatggtggtaaaacttggcaaactgcaaccatccctgctgggggacgagaaataactataggtggtgcagtcgtaactgttcctgctccagctacaacaaatgtaacagcatttgacccagataaacctcttggagatactaatggttccttactatatgtacgtcctacagctatatac

SEQ ID NO: 6101 - DNA, 200 bp, Lawsonia intracellularis
caagggagtgataataactcaaaacctattgtagacagatatggcactgtaccaatgcctccacttaataccaatacagtagggactttttctgataatgtcgttgtaaaattccctaatggtgttgatttatcaactcctggatcatttgatttctcttatagtacagatggaggcaaaacatggacagcaggaaactc

SEQ ID NO: 6102 - DNA, 200 bp, Lawsonia intracellularis
tgaagtcattgtttctcctggaccaccatcaactagtactgcaagactcattctgcctggtggctatatggatataggttctgctgatactacaagtccaaataatactattcctcctgatggacaacttatccttcgcccccaacgaacagatcttagttttgaaatcatggaaggacaaaatattactgtcacaaatg

SEQ ID NO: 6103 - DNA, 200 bp, Lawsonia intracellularis
taggaaaagatatttttggtggaatatattctacaaatggctcatctaatttggaacctatgtttggacaaaatgatggacgtaatttatttgaaacagttggaaatcttattgcgtacactgaaacaaataatcaagaaggcattgcaaacgcccttaaagatcttgaattagcacaaaaaaatatcctaactcaagct

SEQ ID NO: 6104 - DNA, 200 bp, Lawsonia intracellularis
gcacgtattggaggtaaagaaaaccgtcttgaaatcacaaaagaagctcttgatacaaataaatatgatcaaacacaacgcttaagtggtgttgaagatgcagaccttacagaactagtaagccgcttagcacaacaacaaatggcttattctactatattaaaatcttcttctatgattatgcagttaaatttaacaaa

SEQ ID NO: 6105 - DNA, 200 bp, Lawsonia intracellularis
atacatttaatctattactaaatagcaatagtatgaaaaaattctataattaattatcagatggtttaatgatagtacctctatgccttttaataattagtaaatggagttgtccatgctcattttaacacggcgtgcaggggaaagcctatacttagatgataacatacgtataactattcttggagtacaaggtaaac

SEQ ID NO: 6106 - DNA, 200 bp, Lawsonia intracellularis
aggtaaaaattggtcttgatgtccctcctgaaatgaatatttatagggaagaagtttatcaacgtgtcaaagaagaaaatacattagcaactacaatcaataataatgatttaattgcagctgctcaattaacaaacaaagaagaaataataatagacactagattaggacaacaaactattgaacctgaaaaaattatt

SEQ ID NO: 6107 - DNA, 200 bp, Lawsonia intracellularis
aatttccctcaaggattaataggttttgaaaataaacaaaaatttatactattacaaattcaaccagcatcaccatttattatcttacaaagtattgataaccctaagcttggtttacttgtagcagatccatatagttttataaaacactacactgttcaacttaatgatacagaaaaaactattctacaatcagaagt

SEQ ID NO: 6108 - DNA, 200 bp, Lawsonia intracellularis
acacaacttagctatattagttacaatgactattcctaaagggaaaccagatcttgcaagactcaatcttacagggccaatcctcataaactatgataccaaaataggccttcaagtcccacaaactaatttagaaacaacaagtcatgtttatctatatcaccctggggaagaaccaatcctcaacaaatagcattatc

SEQ ID NO: 6109 - DNA, 200 bp, Lawsonia intracellularis
tctttactcttactcattttacattatttactctaaattctctttccttcttttttctaattatcaatctatatcatgaacatatctctatctcactatataaactaatcatatactaactaaatacaattctataatagaagttgcaataattatatctaagtttataatacaacaaaaatgttttcactattaattag

SEQ ID NO: 6110 - DNA, 200 bp, Lawsonia intracellularis
ataagttaagaaattatactatgtttctaccattaccaactccacatgaaatgtctttatgggataaagaatcaatcaatataggtgttccagaaactgttttaatggaaaattcaagtagagaagcattacatgttctaaaaaaaacctttggtagtatagaaaataagtatattcttatactaatgggatctggaaag

SEQ ID NO: 6111 - DNA, 200 bp, Lawsonia intracellularis
aatggtggtgatgcagtatgtcttgcacgccatttacatgatgcaaaagcaaatgtacttgtactacatactcgctcattcattcactacaaaggaactacaagacaataccttaaactagcaaaacactgtggaatactgttttctttagcagaaagctggattacaaaatataataaaaccccttggggggaacctga

SEQ ID NO: 6112 - DNA, 200 bp, Lawsonia intracellularis
tattatcatagacggactaataggaacaggactctcaagcaacttacaacaattagaactagaattagttaatacagttaataaactttcaaaaaaaagctttatattagcactagatatcccttctgggctatcaggacttacaggtaagccacaacctactgctatcacagcagatataactgttacctttgaagctg

SEQ ID NO: 6113 - DNA, 200 bp, Lawsonia intracellularis
caaaaccaggtcttatcttaccagaagcgtcaaactatgtaggcgtgttacatatttgttctattggaatcccattatgtgtacgtaaaaaaaatccaccttcttatcaaatgattaatcaaaaatctaagcttcccctacctaaacctcaacctatgtggtataaaggaaatgctggtcacttacttattattggtgga

SEQ ID NO: 6114 - DNA, 200 bp, Lawsonia intracellularis
tcttctaactcagaggggatactcactggtgcaccatgtcttacagcattagctgcactaagaacaggtgctggccttgttacaatagctgctccttacaagctatgcaatgaaattaaagcaaattatccagatataatgatgcttccacttgggacaccagaaacctatgagtgggggcctgatcttatagaacaaat

SEQ ID NO: 6115 - DNA, 200 bp, Lawsonia intracellularis
actatctaagctacataaatataattgtattgttattggaccaggaataggaagaactataggtacaacccaattcatagcaaaattgcttagtactcctagtcgtatacctaaagtgatagatgcagatgccattattgcattagctgatgagactactatattaaaaaatcttaaccatacagatattcttactccac

SEQ ID NO: 6116 - DNA, 200 bp, Lawsonia intracellularis
accctggagaagctgctactttattaaaaacaaatacaacattaatccaaaaaaataggtttgatgctatccaccaacttacttccctttcttcatctacatggatacttaaaggtgcaggaactatgatagcctctcctcaaagtcctacaactattttccctcaggctattccaaatcttgctattggaggctctggg

SEQ ID NO: 6117 - DNA, 200 bp, Lawsonia intracellularis
gatgttctttcaggctgtatagggactctccttattcattatcatgaacaacctcatattgctgcttgtttagccacacaacttcatcttgaagcaggagcaattctttcaaaacagtttctttatagagggaatactgcattagatattgctaatgctatacctaatgcatatataaaccttatgaaaacatattcata

SEQ ID NO: 6118 - DNA, 200 bp, Lawsonia intracellularis
aactttatgataatatataaatactattttgtactaaactaatttaaaaattctctatcaagaactctacagttaattgcttcagctaaatgctttactaaaacttgttttacacctgcaaggtctgcaatagttctactaatacgcaaaattcgtgtataagctcgtgcagatagagctaatttttgcatagcctcttt

SEQ ID NO: 6119 - DNA, 200 bp, Lawsonia intracellularis
caaaaaattttgtccatccggtccaatttgacaaaattcttcaagaagacgtccagataaatcagcattggttcgacaattagaaaaacttttatacctaactgactgtatctctcgagcacgtaaaatattctctaacaactgagaagaacatctatgagatgttaaacttcttaattcttcataagaaactgtaggaa

SEQ ID NO: 6120 - DNA, 200 bp, Lawsonia intracellularis
cagtgatatgtaaatcaattctatcaagcaaaggacctgatagccttgcacgataacgttgaatctgtgaagctgtacatatacaactatgatttggatctgtagagtaaccacaagggcaagggttcatagcagcaacaagcatacaatcagcagggaaaacaacagaaaacatagagcgagaaatagtaactttacct

SEQ ID NO: 6121 - DNA, 200 bp, Lawsonia intracellularis
tcttcaagtggttgtcgtaatacttcaagcgtacttttagcatattcagggaactcatctaaaaataatacgcctctatgagctaaagaaacttctcctggacgaggagatacacctccaccaataagtgcaatttctgaaattgtatgatgtggtgctctaaatggccttttttgtatcagcccttgctgattaagcaa

SEQ ID NO: 6122 - DNA, 200 bp, Lawsonia intracellularis
tcctgctacactatatatcttcgtaacctccaaagattcttcaaaatctaacttaggtaatatagtaggaatacgtttagcaagcatagtcttaccacttccaggaggtcctacaaatagaaggttatgtgcgcctgcagcagcaatttctatagcccttttagcatgctcttgtcctttaacatcagcaaagtctaaga

SEQ ID NO: 6123 - DNA, 200 bp, Lawsonia intracellularis
ttgactcaacttcaggtaaatctggttcaactggcttcactataggtaatgatattttccctaacaaaaaatctattacttcactcaacgttcttgcaccaaatgtagataactcagcaacaacactagcttcagctgcgttttctgatgctacaataataccttttgctttttctttcctagctaaaagtgctaaagga

SEQ ID NO: 6124 - DNA, 200 bp, Lawsonia intracellularis
agaattcctggaattggctttaacgtccctgtaagtgaaagctctccacccatgaaccatccacttataacttcaacaggcaagttattagaagccacaagtaaacctatggctaaaggtaaatcatacccactgccacctttacgacggtttgctggagccaaattaactgttatcctggcaggaggtagtgtaaagcc

SEQ ID NO: 6125 - DNA, 200 bp, Lawsonia intracellularis
acaagaacgcaatgcagcaaaaacacgctctttagcttcacggacagcaccctcagcaaggccaaccattacaaatgacggtaatccttgacgtaaaaaatctacttcaagatccacacgaaaagcatcaacaccttctaaagctccacaagcaagccttactgtcatgcagtatcctcaacaaacttagtagattcttc

SEQ ID NO: 6126 - DNA, 200 bp, Lawsonia intracellularis
aactgcactttggagtgtagggaaaatgttttctttacctactgcatggataataccagcacggtcaagagtagatcttgttgcaggatgaatatctgcaagaaatattttacaaccagaccttcttttttcaataaaggactctaatgtatggatagctgtcatatctattgtaggcatattatgcaaatataaaataa

SEQ ID NO: 6127 - DNA, 200 bp, Lawsonia intracellularis
ataccttaggagtagtttccattgcttctaaaagtttttgtaaacgatctgcaacaccaaaaaagagaggaccatttattgaaaaaatatgcactccttttggcaacttatccttttcaaccggtatatcttggactatctcatgagattgatattcttttgtaactgtttgtaactgtgtaatttcacccatcctcccc

SEQ ID NO: 6128 - DNA, 200 bp, Lawsonia intracellularis
ataaaaaataatgatgccaaaataacacctacatagacagcagtcgtaagatctaaaactacagtcaaaataaatgtaagcaacataagcgcccaatctgctgttggtccatagaacatacgtctgactgtcattaagtcactcatatcataagcaacgacaacaaggacaccagcaaatgcagataatgggatcaactc

SEQ ID NO: 6129 - DNA, 200 bp, Lawsonia intracellularis
tattgcaggcatcaaataaagaataaaaccaaataaaaatatagcatgaaaaatagaagaaataggtgaatatgctcctgaacgtatattagtcatagttctaccgatagaacctgtcgcaggcatcccattaaataaaacagaaccaatattacctaccccttgagctattaattccatattagaattatgacgtttcc

SEQ ID NO: 6130 - DNA, 200 bp, Lawsonia intracellularis
ctgtcatactatcagcaactacacatgaaagaagggactctattgcaattaataatgccatagtgaaagcatctggtaataagatacgtaacctctcaatactaaaatctaatggtactaaaaaagatgggatatcagatgggagtgttccaaaacgactacctattgtttctacaggtaaatcaaatagccaaacaata

SEQ ID NO: 6131 - DNA, 200 bp, Lawsonia intracellularis
accgttgtaaaaataacacccatcactggtgctggaaaacgaggaatataaaaacgaacgctaataataactaataatgtaaaaaaagaagtaaagagtgttgaaggactaaatgaaagtgcattacgtaagtataaatgccacttatcaaaaaattctggtggagtttcagccataggtaggccaaaaaagtcttttac

SEQ ID NO: 6132 - DNA, 200 bp, Lawsonia intracellularis
ttgtgaagaaaaaattaataaagcaatccctaaggtaaaacctattgttacaggatatggaatatattttataagaaatccaagccgagtaatgccacaaaaaataaggattgtacctgaaataattgttgtaataattaacccatcatatccatatcgtgaaataatagtaaagataataataactaaagcccctgttg

SEQ ID NO: 6133 - DNA, 200 bp, Lawsonia intracellularis
gaccacaaatttgaaaattactcccacttaaaaaggccatgattaaacttgcaactatacttgaataaagacctttttctggtgttaacccagacgctattgaaaaagctaaactaagaggaagtgcgataacagcaatattacatcctgcagaaaaatctttaaaaagcattttatagctataaccctgagctagggtt

SEQ ID NO: 6134 - DNA, 200 bp, Lawsonia intracellularis
ttaaatagactagggacaaatggaatcttatctaatgctttttgtttatagatatccataaaaaatcctcataaaaaatccttagttagtattggagctcaagtataaaataaaatcctgtacaaatttgtacaggatataaaaaacgttatatcaaaaacttctttaatattgtttaccagcatattgaagtcttccag

SEQ ID NO: 6135 - DNA, 200 bp, Lawsonia intracellularis
gtaaaacaagtcgacgctcaagatactttaatagcgctgaaatacttaatgtcattattaaatagaatattgcgacagtgagccatacttcaaaagcacggaaatttacagaaataatttcttgtccctgccttgttaattctccaacacctataactaccaataatgaggtatccttcaaagaaataatacactgattt

SEQ ID NO: 6136 - DNA, 200 bp, Lawsonia intracellularis
gtcaatggagggatcatgcgtctaaaggcttgtggccaaataatatacaacattgcttgggcatgggtcaatccagtagaacgtgcagcttccatttgcccatgagatatagaaataatcgaacctctaacaatttcagcgatatatgcgccagagtttactccaattgctattactcctgcccaattaggaggaatatg

SEQ ID NO: 6137 - DNA, 200 bp, Lawsonia intracellularis
tatatcaagagccaaaggaagggcaaaatataaaaacattacaagtactattaaaggagttcctctaataatttctacgtatattactgccaaagtacgtaaaaaaggaaaacgtggggtatttataagtcctacaagtatccctaaggccaaacctaaaaaaagaccaccaattgtaattataagtgttaattcaacac

SEQ ID NO: 6138 - DNA, 200 bp, Lawsonia intracellularis
cttctagtaatagtggtgctgtctctaacataacttgtggttgaaaatcaaaactcatttaatcaccaggcatttgaaagtaatattaatactctccccattatatatcacttgtatcatttcaataaatataacaaaacatatattatataactacttatacttattagctttaatgtattattcagggggaagtccaa

SEQ ID NO: 6139 - DNA, 200 bp, Lawsonia intracellularis
accattttttataaagttctgtatagatcccatttctcttaagttcattaagcgcagtatttactttttgaactaactcctctgaattttttcgaaaagcaattccatatggttgtcctttatatttaggaccaactagtttaacttttccttttcctgctgaagaggcaaaatactgtaatactggagcatcaaaaaca

SEQ ID NO: 6140 - DNA, 200 bp, Lawsonia intracellularis
acagcatcaacgccaccagtcataagatcaaaaaacattccatcattagtagggaaaagctttaatgacctttgcttaccaaagctcttcataaaatctacagaagaagttcctgtttttacaccaacagttttcccaacaagatcttccaactttgaaattgactcttctcctgcacgaacaagaatcattaatcctga

SEQ ID NO: 6141 - DNA, 200 bp, Lawsonia intracellularis
ttcatagtaaggctgagaaaataatataactttagctcgttcaggagtaattgtcattcctgagattgcaatgtcaatactaccagtttgtaatccaggaataatgccattaaaatccataggttgaaaagtatagggtatattagcaatctctgcgatatgctcccatagttcaatatcgaatcctacaaaattaccct

SEQ ID NO: 6142 - DNA, 200 bp, Lawsonia intracellularis
ctttatctttaaactcaaaaggcattaaatttgtatcatgggcaacgactaacccttttgcattagcaaaaaaaccaaaagtattagtaaaaaatagtcctaaaataaaaacaaatattttatatttcatattgcctctataaacattctttcaaatgctttaataatattaaagtaggatctatttagttaaataatca

SEQ ID NO: 6143 - DNA, 200 bp, Lawsonia intracellularis
ttagatagctaaggtatggtttatagttagcttataattataatagaataattataataaagttgattattaattctaactttattttgataaaatatcaagttagttgttatttaagaaatagttgttagacgtagttctaaaaaataatgttgtatgcatagcaaaataactattactatttaacataaataatataa

SEQ ID NO: 6144 - DNA, 200 bp, Lawsonia intracellularis
taattatctctgataggagataataaataaaaattaaactaacaaactaaatttactacatatttagtcttgaattttctattttagaactatttaaaaattttaaatataacattacttattattttcatcgatatttaattattaccataaattaaaaatgatatagaataattactatataatcccctatataaata

SEQ ID NO: 6145 - DNA, 200 bp, Lawsonia intracellularis
gctaattatatattctcaaaattaaaagagctccattaatggagctcttttaataacgtatattaattcgttaattttctgttggctcctcaagtttcatctttagcagatctccaaggctttgaccagagtcagggcctgttctactatactcccgagatttacgatgctcttcatcttcttttagttgttttattgaa

SEQ ID NO: 6146 - DNA, 200 bp, Lawsonia intracellularis
agccctaaacgacgctcttcagcactaacatgaataatttttgcctgaatttcttcaccatctttataaatttcagagggtgattttatttttttagagcttaattcagaaacatgtacaagaccttcaatcccctcctcgacctcaacaaataaaccaaaatcggtaatatttgtaatgatgcctttcacaatacctcc

SEQ ID NO: 6147 - DNA, 200 bp, Lawsonia intracellularis
aacaggatacacagaaggggcatttgaccatggatcttcagtaagctgcttgatgccaagggtaaacttttcattttcctgatcaacagtgagcacttttgcctgaacagtatctcctactttaaataactcatttggatgacgaacttttttcgtccaactgatatcagaaacatgaattaatccatcaattccatcct

SEQ ID NO: 6148 - DNA, 200 bp, Lawsonia intracellularis
caataccaataaacatcccaaattctgtaatatttttaactacaccctcaagtattgtcccttctggatatttctcacctactaattcccatggattaggcttgacttgcttcatccctagagagatacgctttttatcctgatcaataccaagaataacaacttctacttcatctccttgatgaaccatttgagatgga

SEQ ID NO: 6149 - DNA, 200 bp, Lawsonia intracellularis
tgacgaagctttcttgtccaagacatttcggaaatatggacaagtccttcaactcctgactcaagttccacaaaaacaccataatcaacaagatttgtaacttttccaacatgatgagaagtttcaggaaagcgttctgtgatgtcttgccatggatctggaacaagttgcttcaaacctaaagaaactttttgattctc

SEQ ID NO: 6150 - DNA, 200 bp, Lawsonia intracellularis
tttatcaaaagaaagaacttttaactctaactcctgacctaaattaaccatttctcgaggatgacggatacgcttccaagacatatctgtgatatgaaggagaccatcaagcccaccaagatcaacaaatacaccatactcagtaacatttttgactttaccaacaacaacctggccttcggaaattgtttggagtaaat

SEQ ID NO: 6151 - DNA, 200 bp, Lawsonia intracellularis
cctgccgctttgaatcacgctcttcctctaaaagaactcgacgagaaacaattacattactccgtctacgattaatttttagtacacgaaattcatactcttgatttactaacatatccatatctggtacaggacgaagatcaacatgagaaccaggtaagaatgcttccactcccctaaggtcaattgtataaccaccc

SEQ ID NO: 6152 - DNA, 200 bp, Lawsonia intracellularis
tttatacgacgtacaatacgtcctttaataataccatttttctcttgtagatcttcaagttgatcaaaaagctgcattcttttagctttttcaaaagacaaaataatagttccttcttgctcattctttcgaacaacaaaaacatctattttatctccaactttagctgtaatattcccatcagtattttgaaattcaat

SEQ ID NO: 6153 - DNA, 200 bp, Lawsonia intracellularis
agtaggaatttgtccttcagacttaaagtttacatcaacaagtacattatcatcatctatacgaacgatctcacctttgacaatggttccttcctcaagatcaccaaaatctgtactgagatagtcttcaagtgcgctttcaaaattaaagtctaggtctgtaccgttattttccatagtttcctcagtttccatataac

SEQ ID NO: 6154 - DNA, 200 bp, Lawsonia intracellularis
ctccacaaggcccacatacttttttcaacctaaggtaagtcgttttcaataacaactgtcatggattatggcaagggtcgaaaatctctttataatttttatttgtataaaaaaaggttcattaagaacctttttttatacataactaaatataaaatcgtaataatatctgatagtaattattactatactataactaa

SEQ ID NO: 6155 - DNA, 200 bp, Lawsonia intracellularis
atttatagattataagtagcaaaaaattgtttaaataaatttacaacataatctataataataactacattcattataaactaggttaaattttataacataattactattacccctcattgataaacccacaatctttgggcaaatttgaacgagaagcttccattcgtgcaagattatcacatcgttcattttcaaaa

SEQ ID NO: 6156 - DNA, 200 bp, Lawsonia intracellularis
tgaccactatgccctctaacccatgtaaatataacattatggcgctcaagttgacgttgcagtcttttccataggtcttgatttttcactggttttttacttgcagttttccaattatttttctcccaaaacactaaccactgtttctccacagcattacgtaaatattgagaatcagtatataacataactaaacaaga

SEQ ID NO: 6157 - DNA, 200 bp, Lawsonia intracellularis
ttcttttagcttttcaagagcataaatagctgctatcatttccattctgttatttgttgtgtaactaaaaccacccgaaatctcctgttcatagtctccataacgtaaaatagctgcccatccacctgcccctggattaccaagacaagaaccatctgtgaatacttctaccgatttcaagtagttactcctcacctcaa

SEQ ID NO: 6158 - DNA, 200 bp, Lawsonia intracellularis
ataactatacatactatattgaatagcatagattaactaattgttcatatcatttcagtaaaaaataacataaacttttagggctacttatactagttaccatcttatataacacctttaaatttttacttttaattatacttatatcttaccagcctaagtaaccctcactatacataaacaaaaggacttagtaatat

SEQ ID NO: 6159 - DNA, 200 bp, Lawsonia intracellularis
cccaataataaaaaataaaccaaaaagaaaatgaaaacctgctgtccactttacaagattttttatttcaactgttatatcagggtatttaatacgttggaactttctaattaaaagaggaaaaagaactaatggtaataaagcaactgttggtaatattcttagcgcaactaaacatactaacacaacaaaagccatta

SEQ ID NO: 6160 - DNA, 200 bp, Lawsonia intracellularis
tgcagattaccttataaagtaacaaactgcgcttaaaccctaaccataacgctattgttttaatacctgaagcattatcatattcaatatcacgaagatcatttgcatgcataatagctgtaactaaaaaagctatcggtattgatacaaagaatatattcatatttaatgagtaagtttgtatataatatgcaggaagt

SEQ ID NO: 6161 - DNA, 200 bp, Lawsonia intracellularis
accataaatggccccattaaaaaaaatacaaaaataggtccaagccctttatacttatatggggaccatcctgttgtatatgatgcagctcccaagaaccctataaaaccaaaaacaaagacaggccaaccacataaaaaaattaaaaataagccaatgataatagcagtagtaagcataccaatcccaacatatttcat

SEQ ID NO: 6162 - DNA, 200 bp, Lawsonia intracellularis
tttatatgctggaagaataccagtgacaatttgaggacatgtaatagctgaatctatagtatctacccctgacatatagtcaccatatgtgttaagaaaattagcaccagcctgtaaaaaaataccacctaataaagctaaaatgaataaaaatagatcgaaatggtatccatcactaattgctagcgatgttcctaaag

SEQ ID NO: 6163 - DNA, 200 bp, Lawsonia intracellularis
caataggagtaaatgcagctgtaaatgtccaaggtctacttgcaataatccattgatataacataacaactcccttaacaacactacatatcttattaatactattattatttattattgagggaatcttcttaagaaactgtttatagcttcacaaaggtatttagattaacttttaacctaaaatagggaaaagaaca

SEQ ID NO: 6164 - DNA, 200 bp, Lawsonia intracellularis
aaaaccatgagggtccataaagaatgagaaacaatgcaaggaataaggttgcttgtcctccaaaaaatgagcccccaaaataatcctgcaatagcagcagaaaaaattagcatactattcattgaccatatatgaactcctgcataactgactccagctaatagccaaccacctaagtccccaaaacgtgtcatagccca

SEQ ID NO: 6165 - DNA, 200 bp, Lawsonia intracellularis
acgttgaaaaaatccacgccaaaaaatttcttctgcaggactagtaataaatagcaaaataaaccctataagtactgagttactctgttcacgaatactataaatatctgctacttgtgcttgagcaaaaggaagtaactttgtagcaatcatatctccaagataaaaaatactatacaaaataaatgcagagcctatac

SEQ ID NO: 6166 - DNA, 200 bp, Lawsonia intracellularis
ctaacaagcatactttccatgaaaatttactataatgaaacggagaacccaataaaaaagaaaaaaaagctaacaccatagaagaacagctcatacctaaccaaaaatttatgtatgttgttccaaagactattgcccaaaaaataacagctaataaaactaaaaataaaacttgaagtccagaaggtgtatgatttttc

SEQ ID NO: 6167 - DNA, 200 bp, Lawsonia intracellularis
ataatataacttgtataataccccataacaaaactcccacaacataaaagaccccaaaaagaaagtgaaattgagctgtccatccttcaagtactattaattcattatctatttcagaagctcttagccttttaagtttactatttaaatacggagtaagagctaatggaagtatccctgtaataggaacaagaccaaaa

SEQ ID NO: 6168 - DNA, 200 bp, Lawsonia intracellularis
gcaacaacaaaaatcagtgatacaaatgcacctaaacataatattctatatagtaccaaactacttttaagctctagccaaatagcaactgtactaatattggcaagtttatcatgttgaatatctcgtaaatcatttgcatgcataatagctgtaactaaaaacgaaataggtaatgaagcaaaaaatgagctccaagt

SEQ ID NO: 6169 - DNA, 200 bp, Lawsonia intracellularis
aaggacgtctgcttgaacataataggctggtaaaaccatacatggtcccataagaaaaaatacaaatataggtccaagccctttatatttatatggagagctacctgttgtataagtagctgaaccaataagaccgattactccaaaaagtaatataggccaacctgataataaataaaggattaaacctaagataacag

SEQ ID NO: 6170 - DNA, 200 bp, Lawsonia intracellularis
aaagaactaataaagctatccccacctgcttcactttctcaggtaaaaggattcctctaacaagctgcggacaggttactgccgagtccaacgtatctactcctgaaataaagtcaccatatgtattaagaagatttgttcctgcttgtaaaagaagcccagataataatataagcaaaaagcaaaaaaaatgaaaagga

SEQ ID NO: 6171 - DNA, 200 bp, Lawsonia intracellularis
acaccaggtgtttttaccgttccagaccaagctaaagctgtacctaaagaaatagggattaaagcagcagtaaaagaccaaggacgtgtagcaataatccatgtatataacataactattctccaactacctaaaaaaaaaaaaaaaaaaaaaaaaaaaaaaaaaaaaagtaagagataccttaatctcttataaataaa

SEQ ID NO: 6172 - DNA, 200 bp, Lawsonia intracellularis
actagtttaaattacactatttctcttaaaacactaaccgactgttgaaataaatcttctggggttgtatccgcattaagaatagtaatcctatcaggatttcttcctgcccaatgtaggaaaccatcacgtatacggttatgaaaatccataggttctgattcaaatctaccttctacaatgtttaaccctagtgcttc

SEQ ID NO: 6173 - DNA, 200 bp, Lawsonia intracellularis
atttcgaatacatgctctttcaagtgctttctctacgtctatatctaataaaagtgttttttggggccatataccttttatagctacctcattaaattcccacaacttaccaatattcatacctcgaccataaccttggtatacaatagttgaatcagcataacgatcacaaaaaactgttttcccattcattatcgccg

SEQ ID NO: 6174 - DNA, 200 bp, Lawsonia intracellularis
gctgtatgcactcagatacatgttgagcacgatccgcaagaaataaaaaaagttcactttctgctgtaagccctaactctgaagaaagaacaagagatcttaataaacctcccaactcacaaccaccaggctcacgagtaacaataacatcttcccctctactactaaagtattctgaaagacgatttattaatgtggtt

SEQ ID NO: 6175 - DNA, 200 bp, Lawsonia intracellularis
ttccctgatccttcaataccctctatagtaatgaacactggctaaccttctgtttgatactctgatcttctaacttattactttctagtggggtcttagttgcttgatataattggcgttcaagtgttttttgatatgaagaccaacctgtctctcctgatgaaatatcctgtagtgctgcaatactttgagctatttta

SEQ ID NO: 6176 - DNA, 200 bp, Lawsonia intracellularis
gcatctagattatctatatagtgaagagcaaatgcttcagctgtttgaggcaaccttggtgaagcaaactcataaagaccatgatgactaagaacaagatgtttaaaatgcatagcaagaccttcttctaagcctgactgtataagataactttgaaacttttcaagacttatattaatatgacctattaaccgaccttc

SEQ ID NO: 6177 - DNA, 200 bp, Lawsonia intracellularis
atctgtatagttattatctaatcctcctgaaagttcccatagttttcctatatcatgaaaaatggctccagctagtagcgtttgacgatctaaacaattataatgatcacatattaataaagatacttttactacagaaagaatatgttctaataaccctccaacccatgcatgatgtacaccctttgctgcaggagcaa

SEQ ID NO: 6178 - DNA, 200 bp, Lawsonia intracellularis
ctaatagttttggtttcacctcaggatcatttaatatactaaaaacaaacctatgccatggtttatgtgtaaactctttattacatattgcttctaactcactaaacatatcttgtgagtttcttacacttgcaggtagaaacatgcctatatctatagttagtaactcatcttcatctataatatgtaattctataata

SEQ ID NO: 6179 - DNA, 200 bp, Lawsonia intracellularis
ttaatttgtagttgctctctataactttcagctcttccttttacataagctataattccagttggaatttttggatattcaaggctcattggactccaaatacgggcctctatagtacctgttacatctttaagttctaatcgccaaaaaggtccatttttagcttgttgttgtgaacttgctgcaattaaaaacaaaga

SEQ ID NO: 6180 - DNA, 200 bp, Lawsonia intracellularis
tgccacctcttcacttaacgtaacatctttaatccattgatttttattaaaacttttgttggaagattgcattccgtccatgattatcctatattatatcttttttaacaacttataatagtaatttctaatctgttctttaaaaatcttctgttttagatatgatgtcaagtttacattttaatagctactaggaggtt

SEQ ID NO: 6181 - DNA, 200 bp, Lawsonia intracellularis
gctcatgaacattcttttaacaaatgatgatggtattcatgcttctggactacgagcaatctataatgagttggtgaagttagggcataatgtattcccttttgcaccaaccgttgaaagatcaggagcaagtaactccgtttcacttaatgttccattaactactcaagatgtatatgatggagatttcaaaggtacag

SEQ ID NO: 6182 - DNA, 200 bp, Lawsonia intracellularis
ctataaatggaactcctgtagactgtgtaaaggttgggcttgcaaagcttcatgaaaatccaccggatcttattatttctgggattaatgctggacataatgtaggaacagatattttatattctggaacagttgctgctgctatggaaggatgtgttgcagggataccatctattgctttttctagaccacgtgaagaa

SEQ ID NO: 6183 - DNA, 200 bp, Lawsonia intracellularis
gtggatcccacacaaagctatgcagaacatgctgctaacttactaaaaaaaattgacttttcattagttccaaaaggccaaatacttaatattaactatccatctatatctattaaaaaaactttaggaattaaagtatgtgctatgtccacacagggatgggaacataagcttcataaaaaaaaggatgataatggaaa

SEQ ID NO: 6184 - DNA, 200 bp, Lawsonia intracellularis
accatattggtttatttctccttatattccatatagtcatggtatctcacaaactgatgttttttttctccttgaaggatggattacaataactccattaatgtttaatatgactgctcaaactacactatctaatcttgaacaacactcttttacataacctactaaaataagttataataactttatattttcataaa

SEQ ID NO: 6185 - DNA, 200 bp, Lawsonia intracellularis
tactatttaatttagagatgttatttatgctatttatttcagcgtgatgccttccttttataaaaaaaaatttctataatacactattactatgttagaaaggtatctggttgttcttataaatacacactcatatcacaaagaggttaactatgccacttaccggacctaaagtcatgtttgaaaaggcctacaaagaa

SEQ ID NO: 6186 - DNA, 200 bp, Lawsonia intracellularis
ggatacgccattggagcttttaatgtaaataatatggaaattatacaaggtatccttatggctgcaacagaagaaagggcaccagtcatcttacaagtttctgcaggagcacgaaattatgctggtaaaaactatattgtaaaacttattgaagcaggagtattagatacagatatccctattgttttacaccttgatca

SEQ ID NO: 6187 - DNA, 200 bp, Lawsonia intracellularis
tggtgcagactttgcaatttgtaaaacatgtattgatgatggttttacatctgtaatgattgatggttcccatcttccttttgaagaaaatattgcactcaccaaacaagtagtagactatgcacatgcacatggagtctgggtagaagctgaacttggacgtcttgctggtgttgaagatgatgtatcttcagagcaca

SEQ ID NO: 6188 - DNA, 200 bp, Lawsonia intracellularis
gcgtatacacagatccagatcaggctgtagaatttgtccaacgctctggatgtgactcattagctattgccattggtacaagtcatggtgcatacaaatttaaaggtaaacctgaactagattttgctcgtcttgaaactattggtaatctactcccagacttcccattagttctacatggtgcatccagtgtttcacaa

SEQ ID NO: 6189 - DNA, 200 bp, Lawsonia intracellularis
caatatgttgatatgtgtaacaaatatggaggaaaaattgctggctctgctggagtcccagaagaatttcttcgaaaagctgcctctttagctgtttgtaaaattaatattgacactgatattcgtttagctatgactgcatctatccgtaaattttttgtagaacatccagaagaatttgatcccagaagttaccttaa

SEQ ID NO: 6190 - DNA, 200 bp, Lawsonia intracellularis
acttgcaagacaagctgtaaaagatatggtacaacacaaaattaaatatgttttaggatgtgctaatactatttagctagacaaatcactaaattaaccataatgaatggatgaaatatcctatctttttatacgtcttattaactttaacataaatataacattgcataaggacctcttcaattatgtcagttcgtatt

SEQ ID NO: 6191 - DNA, 200 bp, Lawsonia intracellularis
ggacttaacggatttggacgtattgggcgttatcttataagacttatggcaaatcaatcatatatgccagttgttgcaataaatgctcgtgctgacaatgcatctttagctcacttgtttaaatatgactctattcatggaccctttaaaggttctatttcttatgatgatgatggacttattattaatggacaccatat

SEQ ID NO: 6192 - DNA, 200 bp, Lawsonia intracellularis
caatgtctctagaaaaaaagtaggagagtggatatggaaagatatggatgttaacttagtagttgagtctacaggagctatcaaaacaagagatggacttgaagcacacatccaaactggagcagcaaaagttattatatctacagctagcaaagatactgatgcccttattataatgggagttaatgattcagactacc

SEQ ID NO: 6193 - DNA, 200 bp, Lawsonia intracellularis
ttcccaaagatcaccatatcctttctgctggctcttgcacaacaaactgcttagcgcctgtagtaaaagtacttaatgatgtatttggtattgaacatggtgttatgaccacaattcattcatataccatgagtcaaagaatacttgatggctctcaaaaagatttacgtagagcacgagctgccacgctttctcttatt

SEQ ID NO: 6194 - DNA, 200 bp, Lawsonia intracellularis
cctacaacaacaggagcagcaaaagctattgggcttgttattcctgaacttgaagggaaaattgatggaatggctatccgtgtcccaacaccaaatgtttctttagtagacttcacttgcgaactaaaacaaccagttactgttgatgatataaataatacattaaaaaatgctgctgaggggaaactcaaaaatattct

SEQ ID NO: 6195 - DNA, 200 bp, Lawsonia intracellularis
tggatattgtgatgaaccactagtatctattgattatacaggagatatccatggtggggttgtagatgcgctttcaacatctgttattagctctaaacttgctaaaatccttgtttggtatgacaatgaggcaggttttacaaaccaactccttagacttatcaatcttgtagaaaaatctatgtaaaaataatttattt

SEQ ID NO: 6196 - DNA, 200 bp, Lawsonia intracellularis
gtaaccaaatactattggataatcttttcagattgagcaacaatattagtatattcagagggtggaatccacttctttaaaggagtagtttctgacttttcttcattagaaaagtgaagagaaggaataaatttttttaatacctttcttaatctactcacatttatcaatgtatctatacaggggccattaggacattc

SEQ ID NO: 6197 - DNA, 200 bp, Lawsonia intracellularis
attaagaaaaccataaacagggaaaaaagaaggaatatcatgtataccttccactaaatcccgttcacaagctataccaacaatcatcttaggccttacttcttttataatacgtctagccattgtcccacctgtggcagataaaacttttactcctgactcatcacgtaactctaataatgagccaataggacactttc

SEQ ID NO: 6198 - DNA, 200 bp, Lawsonia intracellularis
cacaccgagcgcagttatcattattgtatgtcaaacgaagtttacaacggcttgcttgtgaacaatgtggtgctaacacaagaacatcatgtggttcatatgataactttgcctttaataacaacaagttatttattgcaataaacgagcggcgaactggctcaattggaccttttatgactctaacaaaaagctctacc

SEQ ID NO: 6199 - DNA, 200 bp, Lawsonia intracellularis
ataggtagtgcaaacctaataactatacttctaagtttgagaggactcattactgtccaccccatataaaaatgaagaagtaattcaactgatatccaactaattggagaaactagtaaaaaacaaaaaagaataacaaacaaagaaactgtagcaggttgattattagaaccaatagtaaaaactaaccataaagaaaa

SEQ ID NO: 6200 - DNA, 200 bp, Lawsonia intracellularis
taacataatacaaataagcaatgcacttatcccaacaaaaaatccaacaaaaatttttaactctgcttcatcagttgcaatatattgagataatacatctctattaatcatttatatctccctaagttacacattactcaacctaaccatttatttatgatcaatcactaaagatatccattccaaaagtctttagcagt

SEQ ID NO: 6201 - DNA, 200 bp, Lawsonia intracellularis
cattgtttttcttccttcaggacgtaatgtataaattaaataaggaacatccttacaagcaatagcaatagcattaccttttagacctaaaatacttcctggtaaaggagaatcaccctcattatacttaaaaagttcattactacctatttctcctggttgaaataatatatttatagggttacggttaaccaacttaa

SEQ ID NO: 6202 - DNA, 200 bp, Lawsonia intracellularis
agcttgtttgagctccaggccatggagttacaccacgaacaacagcatgaacattttctgcaggcatatcccaataaatacacccatcagacttggtcaacttaggtgcataagttgcctgtatatcatcctgtggggtaggatcagataaggtcccctgaataatctgctcaaaaatatttattaataactttcctcca

SEQ ID NO: 6203 - DNA, 200 bp, Lawsonia intracellularis
agttgagcaagcttttcatgcattgttgcagcagtatcttccatattgataggaatctcttcatgggtaaacatagctcctgtgtctaaccctttttccatacgtataattgtaactcctgtcttcttgtcattattcataagtgcacgttgaataggtgctgcaccacgataacagggtaaaagggatgcatgaacatt

SEQ ID NO: 6204 - DNA, 200 bp, Lawsonia intracellularis
taaaggggaaattgcggggatatcaagcactgactgaggcaaaataagtccataagctgctacaacaagaagatctggtttaagagcatatagtttttctatttcatactcactcttaaagttaactggttggtatactggtattcttaatgaattagaaagaatttttacagctgaaaattgaactttatgccctcgac

SEQ ID NO: 6205 - DNA, 200 bp, Lawsonia intracellularis
ctacgggtctatcaggctgacaataactagctataatatctactttcccagatgcaacaattttttgtaaaattattgctgcaaactcaggtgtacccataaaaacaatacgtagaggtttattctgtagtatcatatagcattttttaataatcttttcttcaatcgaccatcataaagtttacgtttcaaataactca

SEQ ID NO: 6206 - DNA, 200 bp, Lawsonia intracellularis
ctctatcaataaatagtttcccatctaaatgatctatttcatgttgtaaacaaactgataacaacccttctgcttcaaaggatacaggattactatcaagatcaatagcatcaagcaacactttagcatgccttttaacttttgacctatagtctgggacagaaagacaaccttcttcgccctcaataaatccagaatct

SEQ ID NO: 6207 - DNA, 200 bp, Lawsonia intracellularis
ataacaggtgtaattttaggattaataagaaccagtaagctacttttttgctctggaccactcacatcaacaacaataagacgtaaaagataaccaacttgtggagcagctagccctatcccatttgcatcatacatagtttgtaccatctgtttagcaagattatgtatatcttgtgttatatcttgaacttcaaggct

SEQ ID NO: 6208 - DNA, 200 bp, Lawsonia intracellularis
tattttttgtaaacttatatctggatactgcaatatttttaaagacatacttactccatataaataaaagtaccatttattatagactaaaaatactatctatatgtattattaggtatgttaaccgttgctaattacaatataataattatcatattgttgaagtaatgcacagtattatatctgtccagatcaaaaga

SEQ ID NO: 6209 - DNA, 200 bp, Lawsonia intracellularis
atgtattatgttatataatcaacctcttcccttttctcctgaaacaccttggcttgcacccattgctggatggtctgatctcccatttcgtttgctctgtcgagaacatggagctgctgtatgttatacagaaatgattagtgctaaaggactcatttacaataatccagggacagaaagtcttttaaaaactatccctg

SEQ ID NO: 6210 - DNA, 200 bp, Lawsonia intracellularis
aagataatcctcttattgtacaactttgtggatctgaagcctcatgtatgaaagatgctcttactatactcctagaaaaagggtataaatggtttgattgtaatatggggtgctctgtaccaaaaataacacgtacaggtagtggtgctagtatgatgaaaaatattgataactctattaagatagcagaggctatgatc

SEQ ID NO: 6211 - DNA, 200 bp, Lawsonia intracellularis
cataccgtaaacaaaaaatctataggatttaagttacgcttaggttgggatgaaaagcatgagacatggcccattttagcaaaattactagaagaagctggtgctggctggattactttacatcctcgaactgctcaacaaggttttacaggaactgcaaactgggaaaaacttttagaactaaaacagcaagtaaaaat

SEQ ID NO: 6212 - DNA, 200 bp, Lawsonia intracellularis
accagtaattgcaagtggtgacttactcacagcatcacatggagttgattgcataaaaaaaacacatgtagatactgtaatgtatgcacgaggagctttaaaagatccaaatatcttcactaaacataatcaaattcttaaaggaaaacagattactacaaccaactcgaacagtttattttctatgataatgcgtcata

SEQ ID NO: 6213 - DNA, 200 bp, Lawsonia intracellularis
gttacttagcatgtaaatatagctcttatgatactgcattattaaaaatgagaactattgttcctagatatattcgtcatttaaaaggtgcaaaacaacttcgtttaaatattattagttgccgtacatggagctcatttgaagatatattacaacaatttttaaaaaaagaacaagtagcctcctgtaatgaaaattag

SEQ ID NO: 6214 - DNA, 200 bp, Lawsonia intracellularis
taacgttttaatatccttactctatccatatgagacttccttgtcggccacacttgctatcacgtcgataagaaaaaaaaagctcaggtaaaagatacgtacaaagatccaaactaaaaatattcttagaaagaatccctacagatttaagctgaaaacatgttaactcccataaatccattgtttctgtttctatagaa

SEQ ID NO: 6215 - DNA, 200 bp, Lawsonia intracellularis
aaccaaggatcaaaatcttcatcccattcttccttaaaacttgtgaacttagcatatgctggtgaaaggcttggacctcttacaactaaaacttctgatggttctactttataataactacaaaaattttttactgctgtttgaggaaactcaatacgatttccacgccaacccacatgaatagcagctatataatggcc

SEQ ID NO: 6216 - DNA, 200 bp, Lawsonia intracellularis
acttttatgcgctaataaaataggttggcaatctgctgttctaattaataaccctacacctttttttgttgtactgatcccatctgcttgttgagtgaccccagaggcattccctttataaaacgttggttctgattcaaacaataaaacatccccatgaacttgctcaacttcaataagttggctaatattagcctgct

SEQ ID NO: 6217 - DNA, 200 bp, Lawsonia intracellularis
tcataattcgacgacgaccaaaagttttcttctctatatcagcagggaaatggttacccaagtcattgggataggtcccctcttttgttttatctaaacatggagtttgaaataaacaacggacccctgagactcctggaaatataaatggaataccaactaaatccatatgaaacctaactctgttatatatccatgca

SEQ ID NO: 6218 - DNA, 200 bp, Lawsonia intracellularis
taggtacatcagatatactgggattaaattctacaatttgactttgataaatcaaagctacccttactatccgatcccatccagacttagaaagaagtttatcataataccctttaccataacctaaccgagctccaaaacttgtcaatccaactgctgggactataattaactcaggaagattcttgccagaaacagca

SEQ ID NO: 6219 - DNA, 200 bp, Lawsonia intracellularis
atacaccttttataatctggctctaagatcccaaaaggaccaacaacaagctcttcccaacctcgacaaagggcaaattccaactcaggttcaccacttaaaatacatctaggtaataatacttgttttccttcctgccaggcttgccttaaaagtgactctgtagaaacctcattttttatagaagaatacaaagctac

SEQ ID NO: 6220 - DNA, 200 bp, Lawsonia intracellularis
agagcgagctctcctccagacatcatcattaaataactttgctgcaattatacgagaagcactatgaacctcttcagatgaaagtgcctgacggcgaataatacaagagtttcgaacaaaatccttatctagcatatacataagccttaaatatcttttgcaaatatccctttgtcaattatcaatcactctgttacaat

SEQ ID NO: 6221 - DNA, 200 bp, Lawsonia intracellularis
taattttatatattataaactactttttatctaagagaaaatggtgtactaactaagtttttacaatattgttttactagttctgtgcaaatcaataatttagatataaataataatctataagaattactattaattaagataaagttgctagttctgaattagaataacaaaaaataaattttataacgctcaatatg

SEQ ID NO: 6222 - DNA, 200 bp, Lawsonia intracellularis
ttattagcattttcagcctaatgttattcaaaatagtgataaataaaaaatgcaaaatcaatatatggacacacctaatggaatatttataccaaagattataatataacaattttaagctgcacatgaagattttacatcatcctaacactaatataacataatgcctctaaatataggtgacaagttctatctagctt

SEQ ID NO: 6223 - DNA, 200 bp, Lawsonia intracellularis
actaagctaaagcaaagctaaaaaacacctaaaaaaatagacaagtatacttatgtcataatatatcaaacagttcaatgataactaaaagataacaaactgactaaaagttattagttatgaagtatcgaaaaattagagtatatattgttttgcttaacatttgtgactaaattatatttaatgagataattaattat

SEQ ID NO: 6224 - DNA, 200 bp, Lawsonia intracellularis
tcctttttataattgagtataaaacgttataaaaaacaactttttgacgatattgctgttatatgccactatagcttctggtatttataactctttaaatttgatgtacatggattagccttaattaaataatatatagtaactaacacgttataacctacaaaaaaatatgcaaaaagttcaacaaaataaaagtattt

SEQ ID NO: 6225 - DNA, 200 bp, Lawsonia intracellularis
ctagaaatttatcatactattctctcactattattacagttaattactctaatattatactaaaaaatttacctaaaaagttatgtctagccttgaatgttctattataaaacaaaccattacaaatgataaaagaataatgtcagaaaaacatgaatattttcaaacagaaaagtctatttctagtaatagacacaata

SEQ ID NO: 6226 - DNA, 200 bp, Lawsonia intracellularis
gcaataataaacctcacgcacaatatattcaacttaccctaaaaaaagatacaatgacacagttagaagaaactatccctgtaatggcagagcactctaatcaaaaaactgcttcaccaacaactcataaccatagcataattaatgaaatagaaactcaagatactcaacagacacttgaaagtcagcctatagtgact

SEQ ID NO: 6227 - DNA, 200 bp, Lawsonia intracellularis
catagcctaactttacaacaaacttcccaagcaacaccagaacattcagagcaaacaagtactaactcatggagtgaaaataatatatctaaaaaaatacctcataatgtataccaagctagtacaaaaaaactaaaaactcgttcacgttcaaaaaataaaaatagaacaacaaaaaattcaacactacctgtgcctac

SEQ ID NO: 6228 - DNA, 200 bp, Lawsonia intracellularis
aacaaatcacttacctgcacttatatccaaaaactctggattagaacaaaattcccctgaaataaataaaaaaatgcttattagtgttatccctggtgaacaggtagaagtcgctatctctagtgatggtcaactttttgaatattttattgaaatgaaccatcatgcaaaaattagaggtaatatttataaaggtgtta

SEQ ID NO: 6229 - DNA, 200 bp, Lawsonia intracellularis
ttaataatattgatgcaaatcttcaggcagcatttattaactatggcaatacaaaaaacggattcctacaaatagatgaagttcacccagaatactaccttcaacctcatgagccaacaaaactaaaaaaatatccacctattcaaaaagtacttaaagctggtcaagaaatacttgtacaagttgtaaaagagcctact

SEQ ID NO: 6230 - DNA, 200 bp, Lawsonia intracellularis
ggtaataaaggagctttccttaccacatggctttctcttgctggacgatttcttgtacttacaccaggacaagaacaaataggtatttccagaaaagtagaggatgaagaagaacgtacccgactacgtgaacttattaaagggcttgatccagggagcggtcttggagcaattgttcgaactgttagtattggtacaag

SEQ ID NO: 6231 - DNA, 200 bp, Lawsonia intracellularis
taaaacaacacttcaaaaagaccttagttttcttaagcgtgtttggagagaaattcgtaaaaaagctacaacagaaaaatccccatgtctaatctatgaagaacctggtctagctactagagccgttcgagattatcttgctgatgatataactgaaatttgggtagatgatcctgaaaccaaacaagctatacaagaag

SEQ ID NO: 6232 - DNA, 200 bp, Lawsonia intracellularis
taactacactgctctttcccagaaaaacaaaacttgtacatttataccaaaataacaatgaacctctttgggaacactttaaacttaacaaacaaattatacaggtacattctagagaagttataatgccttccggaggcagacttgtttttgatcaaacagaagcattaatggctatagatatcaactcagggagaatt

SEQ ID NO: 6233 - DNA, 200 bp, Lawsonia intracellularis
gcaggaaaaacaaactttgaatctatggcctatcgtacaaatatggaggctgctgcaactatagctcaacaacttcgcttacgtgatatcgggggacaaattgttattgattttatagaaatgaaagaacctgcccactgtagagatgtagaaaaagagcttcaactggctatgaaagcagatagagctcggcatgacgt

SEQ ID NO: 6234 - DNA, 200 bp, Lawsonia intracellularis
agggaaaatgagttcttttggcttgttacaagttgtccgtcaacgtattgggtcatctgctatctctattagccaggaaacctgtccatactgccaaggaacaggtcaaagacgaaatattgaatggcaggctattcaaactttaagagaaattcataaaaaaatgcaacaaactgttaccgctggtaaacatgaatata

SEQ ID NO: 6235 - DNA, 200 bp, Lawsonia intracellularis
ttcatactctagatcaagaacttggtctttatcttcttaataataaacgtaatcgtttaattgctcttgaacaagaatttggcattcatcttgacattcgtatttcactcctacaaaaaatagaaaatagtgatttataagatatgaaaaaagtgcttatccatttatgctgtggcccatgtagtattattcctatacaa

SEQ ID NO: 6236 - DNA, 200 bp, Lawsonia intracellularis
atactacaagataaaggctataaagttagcggatactttgctaatcctaacatacatccactatcagaatatttacgccgaagagaaagtactgaagaagttgcaaacaaaatgggtattactatgttttggcaagatgacatctataatgtttctaactggttagaaactgtctatcagaaaggaattgcagataacaa

SEQ ID NO: 6237 - DNA, 200 bp, Lawsonia intracellularis
aggtggtcttcgctgcctttattgctatgatagccgattaaaacttacccaaaaaacagctcaagctcatggatttgatgcattcacaacaagtcttttttactcaagacatcaaagacatgaacttattttaaaagcaggagaaaaaattgaacaagaatctcctaatgttcaattcctctatcaagactttagatctg

SEQ ID NO: 6238 - DNA, 200 bp, Lawsonia intracellularis
gatggcaaaaaggcattgatactgcaaaagaatggggactttatcgacaaaattattgtgcttgtatttttagcgaaacagaacgcttccaaaagaagcttaataaattatcaaatgttactaccccttcttattaatattcttttatagaaaaaatttaatactaaaattatacctgtgctctaaatagctctatagat

SEQ ID NO: 6239 - DNA, 200 bp, Lawsonia intracellularis
tgagaaataccaaaagatgtcccaaaaagaaaaactgtatctccagctaataactcttcatcgggaccaggagaagctattatattctcctttctacgaatacctacaatagttacaccatgtttgcgacgtaaatctgtatgtaacaatttcttattttccatatcagatccagcttctactttacatgctgtaacttc

SEQ ID NO: 6240 - DNA, 200 bp, Lawsonia intracellularis
aagcccagaaagaagctcttctgtcaatgaaggtaagtttgccccatgaaagtttaaatccctcaccatctcatagttttcgcttcgaatactatgaacaaatttttcaatagtttgtctaggaataaggtagtatccaagaactcgagtaaaaatttctatagacgtttcaaaatcttcagggatgacatcatttgcac

SEQ ID NO: 6241 - DNA, 200 bp, Lawsonia intracellularis
caagctcatgtaaatatgggacctcacctaaaaatcttgtacgtacaataaggtgtaaagatgggttcaactttcttgctgcagcagtgatacctctagttgctgcagaatcagaaataacaacaacaagtattcttgctttttcaaccccaaaatgcttaagtactaatggatgtgaagcatccccatggtaaataggc

SEQ ID NO: 6242 - DNA, 200 bp, Lawsonia intracellularis
tcttgatctctaagccttcggactgtatcaggattcatttcaagaataacataaggaatccctgtttctctagctgttcgtgcaagatacttccctcctaaaccaaaaccaactataataaggtgatcttgtaattctccttgatgagttagaagaggtttttcttgggaattatcatgattaaaaaacttcccaataaa

SEQ ID NO: 6243 - DNA, 200 bp, Lawsonia intracellularis
ccttgctgtctttggggctatacttatgagtcctggagttaaaaccatagttaggatactagcagcaagaaaattttgatatccaatagcatcaagaaatccatggtctacaccagacttagcaagaacaaaagaaaactctccaatttgtcccaaactcattgccgccattatagcaactcttaatggataaccaagaa

SEQ ID NO: 6244 - DNA, 200 bp, Lawsonia intracellularis
aagtcattgcaggaattgctagcaaaactttgatggtgatcaatattactgccaatgcaatgacacttccaatatgatctataaaaaagtgtacatctagcaacatccctacagcaataaaaaaaagactagtaaaaacatctttaaatggcaatataccctcaactacactcatactatattcagattctgctagtaga

SEQ ID NO: 6245 - DNA, 200 bp, Lawsonia intracellularis
agtcctgctaaaaatgctcctaaagcaagagataatcctaaataagctgtaccaacagcaacagctaaacaaaaccctaagctggtcataagaaacaattcacgacttcgagtacgcattacttgtctcataagaactggaactacacgatatgcaagaaaccagccaccacctaaaattaaaaccaaccgtcctgcaga

SEQ ID NO: 6246 - DNA, 200 bp, Lawsonia intracellularis
taacaaaaatgaaataggatcagcctctccctgccctgctaataatggaatagagagcatcatagggacaatagctaaatcctgaaaaattaatacagataaagcaagcctaccatgtggagcttctgattcacctctctgttgaaggatacttaaaacaattgctgtcgaagaaagagtagcaagataaccaattaaaa

SEQ ID NO: 6247 - DNA, 200 bp, Lawsonia intracellularis
tactctgagggaatgtccttccaaaaagcatagcaataccacacataacacctgtggttaaaacaacctgtatagtacctccaacaaatacaggttttttaagacgtgcaagttcttcacctgataactccatgccaatagtaaaaagaagtaaaacaacacctatctcagaaagaagttcaacagcatggacattttct

SEQ ID NO: 6248 - DNA, 200 bp, Lawsonia intracellularis
acaagccctaaagcagatggaccacaaagtacacctgttaataaaaaaccaacaatcgcaggaactttcaacctgagacagataagcaaaacaccaattgaaagacaaaaaatataaactaggtctttaagaaaaggaatctccatgtatgcctcttttattacagctattttacatattttttaatacaatgaaatata

SEQ ID NO: 6249 - DNA, 200 bp, Lawsonia intracellularis
accgtacaataagtatattacaactagcaattacattaaaaataatctttttgataaacttatcaataagtacacttactataaatactaccttaaataaaaaataagaaaaaatatctcttaataaaaaaaaaagaaaaaaatacaagtgccttcttaaaaaaaagctgatagactataatatattctagttatgttgt

SEQ ID NO: 6250 - DNA, 200 bp, Lawsonia intracellularis
gaggcatacccataatgcttttctcaccaattcgtcataaaattgaaaatttaaaaattattattgttggtgctggtgaagtaggctttcatattgctcaacgtctttctgaagaacataagcaagttattgttattgacacaagccaagaagcattacgaagagtccaagaaaacttagatgttcaaactattcatggt

SEQ ID NO: 6251 - DNA, 200 bp, Lawsonia intracellularis
tctggatcaagtccttccacattaaaaactgcaggcattgaaacaacaaatatttttcttgctgttacagatagtgatgaaataaatattacagctacactttttgcatatgctttatcaccccatattattaatttagcacgaattcgtaatgaagaatatgcctcttatcctgaacttattgaaaaaggtccattaaa

SEQ ID NO: 6252 - DNA, 200 bp, Lawsonia intracellularis
tataagtatgcttgttaacccagaagaagaagttgttagaactattgaacgacttcttatgcttcctggtgcagtagaatatggagagtttgatggtggacgaattaggttagttggtatacgtgtaatagatggtcccttaatagatcaacagctctatcactttcgagatattgttaataatgacggtataatggtag

SEQ ID NO: 6253 - DNA, 200 bp, Lawsonia intracellularis
ctgccatctcaagacaaaaaaaacttattatacctagtggaatagataccattcaaaaggatgatattgtatattttatatataaatccaaaaatcaaaaagaacttctaagagttttaaataaaagccatggaataattaatgtagcatgtattataggtgggggtaatattggtgtccgacttgcaaaagcttttgag

SEQ ID NO: 6254 - DNA, 200 bp, Lawsonia intracellularis
caaagagatattaaagtaaagctgattgataataatgaagctcggtgtaaaaaacttgctgatagattaaattctactcttgttttgtatggagatggcactgataaatctcttttagaggaagaacatattgatcaagctgatgcatttatagctgtaacaagtaatgaagaagtaaatatacttgcttgtcttttagc

SEQ ID NO: 6255 - DNA, 200 bp, Lawsonia intracellularis
aaaatcgcttggcgtcaaagaagttgtagcaagagttaataaacatgcgtacttaccattaattgaagctacaggtattaaccacattgtaagcccaaggttatctgcagtaaatagtatccttcattatatacgacaaggtggtgtactctcaactttaacagttggaggagaagccgcagaaattattgaagtattag

SEQ ID NO: 6256 - DNA, 200 bp, Lawsonia intracellularis
ttcctgaaacatctaaccttcttaaaaaacctattagtaaactcaatttcccacatggagccttactcttaactatattaagagaaaataaaagctttattcctagtggacaaacgattattgagcctggagatcgtattgttattatctgtcttagagaaattatgaaccgtgttgaacaactacttacagaaccaccc

SEQ ID NO: 6257 - DNA, 200 bp, Lawsonia intracellularis
ctagaagaaagtacctctgtcacgttataattaactacttaataggtatgacaaatgctatctaaatataagggtacttgggacatagaatagataagcctgtattccataaggtgttacatgcaattacgctctgttttttttattattggtgttctcttaatatgtattggaacatctattattttccctttacttac

SEQ ID NO: 6258 - DNA, 200 bp, Lawsonia intracellularis
ctctatttattataatgatggagtagcaaaagacttagcattgtctttatcagtagttattataagtggatttttattagcctttatttgccatcaaaataaccccataattctcagtaaccaagaaggatttgctgtagtaggcctatgttggattattgctagcattgctggttcactaccttatgtatatattggta

SEQ ID NO: 6259 - DNA, 200 bp, Lawsonia intracellularis
tcccctttacagatgctgtatttgagactgcatctggttttacaacaactggagcaactattttaacagatattgaagccatacctaaaagtatactcctatggcgaagcttaacacactggcttggaggaatgggaatcattttactctcacttgctgtactcccattacttggagttggagggatgcaactatataaa

SEQ ID NO: 6260 - DNA, 200 bp, Lawsonia intracellularis
gcagaagttcctggtccatcaccagataagttaacacctcatatgcaagatactgcaatgcttttatggaaagtttatggtattatgactcttttccaaattatacttctctatcttgcaggaatggatctttttgatgctattaatcaaacattttcaacagtatctacaggtggattttctacaaaaaataattccat

SEQ ID NO: 6261 - DNA, 200 bp, Lawsonia intracellularis
tgctgccttcccaactccagtaattcaatggataattattctatttatgtttgcatcaggtataaactttactcttcactataaattactattaggactactaccacactacacccatgatacagaatttaatctatatacactactccttattataggagctatcactattggtgtgttacttattttttatcatatct

SEQ ID NO: 6262 - DNA, 200 bp, Lawsonia intracellularis
atccttctaataccttatctcaaatagaacaaatagttagagctagtgtctttcaacttgtttccatctgtacaacaacaggattcatcacagaagactactctaaatggcctcaactagctcaaggtattctacttttttttatgttcatgggggcatgtgctggttctactgctggtggcctaaaaactatgcggatt

SEQ ID NO: 6263 - DNA, 200 bp, Lawsonia intracellularis
atagttattgcaaaagttgcctatcaagaaatatttagactattacatcctcactctatacgttttgccaaacttggcgataaaactattcaaaaagatgttctctctggtattataggatttctaattctttacctttttattttactcataaatacgcttgcacttatggcactaaactatgatcttattacctcttt

SEQ ID NO: 6264 - DNA, 200 bp, Lawsonia intracellularis
ttctgctacacttacctgcctttccaatgtaggaccaggacttggtagcgttggaccagtagataacttccatcaccttgataacatagctaaatggtttcttattttttgtatgttattaggaagattagaaatttatgctatccttattttattcattcctgaattttggaaagcattaaaataatattcagttatac

SEQ ID NO: 6265 - DNA, 200 bp, Lawsonia intracellularis
ctaagcattgtaaaaaagctacttaggacttgcataggaactacttttaagtcaaaattatataaaagaattctaaaaatgaagggtatattaatgggtaaaacaaacttaggtattgatcaagaaggattcccctatattgctatttttgctttttcatcactcatttttgctatattaggctggtggcttttggctgt

SEQ ID NO: 6266 - DNA, 200 bp, Lawsonia intracellularis
tctttgtttaatagggacaatattttgtggccactttttccgtgatccagaaagaattataccaacagaagcaaatattgccgttagtcctgcagacggtaaaattattcgtattgaacctcgacaagatcctattagtggagaaagtcatacttgtattagtatttttatgaatatatgtaatgtacatgtaaaccgct

SEQ ID NO: 6267 - DNA, 200 bp, Lawsonia intracellularis
caccaataaaaggacaaattgaagcaattcaatatgtacaaggtcactttcttaatgcatccttagataaggcagctaaagaaaatgaacattgttcttacctccttagggatcaagatggtaagcaatgggtagttgttcaaattgcaggccttattgctcgacgtattgtttgtcgtaccaaagaaggagatatttta

SEQ ID NO: 6268 - DNA, 200 bp, Lawsonia intracellularis
aatcgaggggaacgatttgggatcatccgatttggctcacgtgttgatttatacttaccagaagaatatactcctacagttaatcttggaaataaagttatagctggagaaactatcttagcaaaaaaaaatcaagaatagtataaaaatacttttaagttaattaaaaaataatcttcattaaaataatactgttatcc

SEQ ID NO: 6269 - DNA, 200 bp, Lawsonia intracellularis
ttatgcaagaaaaaaaaatcactcctaaaggggtatatatcctaccaaatatttttactctagctagtttattcttagcctttattggtatgatacaagttatagggaataaatttcatatatgtgcacttattattcttggtagtgctgttttagatgggttagacgggaaaatagctaggcttacaaatacatctagt

SEQ ID NO: 6270 - DNA, 200 bp, Lawsonia intracellularis
gaatttggtgtacaactagattctcttgtagaccttgtagcatttggtgtcacacctgcatttttagcatggaaatttggcttagaacaatttggtaaacttgggatttgtatctcatttctttttattgcttgtacagcactaagattagcacgttttaatatttctacatcaattctatgtaaaaaattttttgttgg

SEQ ID NO: 6271 - DNA, 200 bp, Lawsonia intracellularis
gctaccttgcccaacaggaggatgttctctagcattgtttatcctatttacaccataccttcctaatttttttaataaaatacttccacacatactacttacacttacttttattctttctttacttatggttagtcgaataagatacttttcttttaaagaatatggatttttaaaaacacatacttttagctctatgg

SEQ ID NO: 6272 - DNA, 200 bp, Lawsonia intracellularis
ttactgctttacttctttttgtattacttttatcagagccagcagttatgggttttatcctatgcataatatatttattatctggcccaatctatacatatattttcctacctaaacgtagttatcctttagggaaaattgatcttctttaaaagaataccttttgtttttaatagataacaaagcttccttataacaat

SEQ ID NO: 6273 - DNA, 200 bp, Lawsonia intracellularis
aatagttagctattttataccattatgtggacaaaatgtattcatttcacaaagagtacatagtggattttttgctttacatacatgcctaccaaaccaaaccattctatgatttatagcaccccattcactttgggggaacaaattcattaaatctttctcaaccaaagatggatctttatttgctgttaaacctaaac

SEQ ID NO: 6274 - DNA, 200 bp, Lawsonia intracellularis
gataggaaatacgctttacatgtgtatcaacagcaataccaacattaataccaaatccaccccaaagaacaacattagcagttttacgtgctactcctggaagagtgataagttcatccatagtctgtggtactactccattataattatacataatacgtttagctgtttctataatatgctttgctttacttttataa

SEQ ID NO: 6275 - DNA, 200 bp, Lawsonia intracellularis
aaacctgttgttcttattacttgttcaacctcctctaacattgctaaagctaaagcagaagggtcaggccaacgtgtgaataaaataggagtaacttgattaacacgtgcatctgtacactgtgctgataaaattgttgctattagtaactcccaaggattgcttgctactaaatgtgtttcaaaggtaggatatctttt

SEQ ID NO: 6276 - DNA, 200 bp, Lawsonia intracellularis
ttttaatagtgataatacacaagctgcacgctgcttttttattgtattttcttttatcattaatataacctaactaattatatatttatcacaattctataataaaaagaattattgaataaaaaagggaaaatagctatatgtaacatattaatcttgatactataattggaagagttttggttatacttgtttacatc

SEQ ID NO: 6277 - DNA, 200 bp, Lawsonia intracellularis
acagcaccaaatgaaaatgaggcagagtatcttgcgactatgttagtaaaacaaaaagttgctgcctgtgtaaacattatccctaaagtacagtctgtttatctatggggaaatagcattcataaagataatgaagttattttattagtgaaaactattgaatcccactttaacaagataaaagaaattgtatgtagcat

SEQ ID NO: 6278 - DNA, 200 bp, Lawsonia intracellularis
ccacagttatgataccccttgtattattgcactgcctattatcttaggagagaataagtttcttgcctgggtagaagatacagtcaaagaggagcattaaatgatctatattgctggttcattagcttatgacaagataatgaatttcccagggaaatttgaagagcatattttagcagataaactccatgttcttaatg

SEQ ID NO: 6279 - DNA, 200 bp, Lawsonia intracellularis
tatgtttcttaataaatggacttatagaaaaacgtgggggaacagctggaaatattgcatataccctttctcttatgaatgaaaagtcttatatcctttcttcagtaggaactgactttgaaaattatgaaaaatttttatcatccttaaaattacctcttgatgggatcagaaaaattccagatacactaacagctgta

SEQ ID NO: 6280 - DNA, 200 bp, Lawsonia intracellularis
gcctacatcacaacagatcaaagtaataaccaaataacaggattttatcctgcagctatgaacttcccatgcctatatgacttacctcagcttaacaaaatgcatgattgggctattatttctccaacaaatatagaagacatgcaaaaactaccaactatcttctatgaaaaacaaataaaatatatttttgatcctgg

SEQ ID NO: 6281 - DNA, 200 bp, Lawsonia intracellularis
tcaacaacttccagtcctttctaaggatgatcttttaaatgcaatcacaggatcatctattcttgtaactaatgactatgaatttgaaatgatttgtaaaaaaacagataaaacaagagctgaattacgctctctaacaggagcaattattactacacttggtgatcaaggggcattaatacatacagataaagaaatat

SEQ ID NO: 6282 - DNA, 200 bp, Lawsonia intracellularis
ctattggaattgcagttcctaataaaattatggaccctactggtgctggagatgcctttcgtgctggacttctaaagggcttaatacataatttggatatagtagagtctgcatatcttggttcgactgcagccagcttttgtatagaaaatagtggaacacaagaacatacatttacttatactacattttcagagaga

SEQ ID NO: 6283 - DNA, 200 bp, Lawsonia intracellularis
tacaaaaaagcgtttaatgaatatcccacactatcttggtagaagataaacaaaaaattaaccacagttatttcatttagttaatctctaaaaataagagttcaaacttgttggaaatcactaacttcttgagagtaaaaaagtcatagtaactatcaagatatattgtctatcttttttatattaattattatggccta

SEQ ID NO: 6284 - DNA, 200 bp, Lawsonia intracellularis
tttttaatataatacttatatattcaactagctaatctaaataaatttaataaaaaacttttattacctttcatataatttacaaagttagattttattttcattctttatatacaaaggcactcatagtgataaaaaaagacattttataccaagacattacattagatagaaataataataataataaagaaaaaaaa

SEQ ID NO: 6285 - DNA, 200 bp, Lawsonia intracellularis
atagctataacaaatagccaccaaatatacaataaaaacaatgtattaacaaacctactttcacttgataaagaaattattaccctacttgctaagcgagcacatttactttcaaaacttccaaaaacaggtttatcagcccatgagaaacaactacgtatttcatgggaaaaaagtgttacaatgctcagtaaagatcc

SEQ ID NO: 6286 - DNA, 200 bp, Lawsonia intracellularis
acagtttactcgtcaactgtttaccttaattcaaggaattgaagtcataccagaagctatagaacagatttctgctttctgcctttcaccaaaaaataaacctgtgaatattgtattaccaataccatcatgttttcgaacaacacagttaaacattgcaatggctgtctgttctaattctgaagggacattacaacatg

SEQ ID NO: 6287 - DNA, 200 bp, Lawsonia intracellularis
tattactaaatgaccctatcatagaatgcataaaagcatttaaccaattaggtgcatctctccactgggaagaatctggctgtattatttgtagtaacccaaactttacaagaaaacattataaaaagtctatacaaatagatacagttatacatataggtaatgataccttatccttatacctccttattttttttata

SEQ ID NO: 6288 - DNA, 200 bp, Lawsonia intracellularis
gctacttgtccagcacgagttaagtttatagggaaaaactctcttaaacttgcagacttttcacctttacgtaaatttcttcctatgattggttctagacttataaatattattcctgggcaagatgggcttcctataagaattgaatcttcagcaatacttccatctgaaattataatccctacagatttacctgttga

SEQ ID NO: 6289 - DNA, 200 bp, Lawsonia intracellularis
tgctgttattgctttgtttattgctgcaacacggtgggataaagagctacttattgatattaaagaacatcctaatgtaacatatattttagataagataattccactatttgaacagtggcaaataccttttcaaaaaattatattcaataaacaagttacagcaatatctattactccaaataaaataacttttcctg

SEQ ID NO: 6290 - DNA, 200 bp, Lawsonia intracellularis
aaaatccaatgataggaacatacgtccctgggacagcaacattactggccctacctgcatttgttggaggaacagttactttaaaacgccagtaccaacaacataccgatatttgtttattaatagaagtattaactcaatttggtcttaatattacagaaacagcagatacaatttgctgtacaggaagacaaataggt

SEQ ID NO: 6291 - DNA, 200 bp, Lawsonia intracellularis
ctcacttcctcttctttgaatataaagacacttcctaaagaactatttccacttatactcacattactatgcattccattactcaaaagtgaaacaaaccttcttccagagcttcctgactatgttgatgaatcaatcctagacagttatttagcacaacttggacttgtcagaatgggttcaaaagtaaaacttatttc

SEQ ID NO: 6292 - DNA, 200 bp, Lawsonia intracellularis
accaacacaaacaccttggactagtccttcagacacatggggattagctatctctttagcagcctttttacgcccacaaattaaacttagtaatcctggatgtgtagaagctatttatcctaactactggaaaatatataacaaactaccaacaggagattatacaatgcaatcttctaaaaaatattccccaacacctg

SEQ ID NO: 6293 - DNA, 200 bp, Lawsonia intracellularis
ttgaactatctgaaacaaaaaaagttaatcgacgtagaattattactgaataacaaaaaggttataaaatttatgggaaaaagttcaccatcaaatccaccatgcatactcactattgcaggttctgattcaggtggaggtgctggcattcaggcagatcttaaaactattgctattcttggtggatttggtttaagtgt

SEQ ID NO: 6294 - DNA, 200 bp, Lawsonia intracellularis
tattaccgctcttaccgcacaaaatggacttggagttacaggtattcatacaccagatccaagctttatagaactccaacttaatactatttacaaaggtttttttgtaaatgtgttaaaaacaggaatgctcttttctgttcctattattgaaatagttaaaaatatcataaaaaaacaacagactctagcagtaattg

SEQ ID NO: 6295 - DNA, 200 bp, Lawsonia intracellularis
atcctgtatgtgtaagtcaaagtggataccaactactagaacatactgctatagatgcattaagaactcatattctgcctctagcaatgttggttactccaaataaacctgaagcagaacttcttacagaaatgcaaatagaatctgaaaaagacatctatattgctggtaaaagactcattgatatgggagcaaaagct

SEQ ID NO: 6296 - DNA, 200 bp, Lawsonia intracellularis
gttcttattaaaggtggccatttttataaaaataacttagtaactaattatgttgattggtatattgaaaaaaatagtactaatccaatacctctttctcaaccagctataaaaacaaaaaataatcatggaacaggctgtaccctttctgcagcaatagctacctatattggccttgggttagaactaaaaaaagcaat

SEQ ID NO: 6297 - DNA, 200 bp, Lawsonia intracellularis
tctacaagcacaaacctatttaaactattgcctcaagtttagttatactccagggaaaggtatagggccacctaatcatacagcatggctcaatagaaaactataatatctactactactactactaataataataataataataatatgttttgctagctttttatataaaaagtaaacagggaaagaaatatattctt

SEQ ID NO: 6298 - DNA, 200 bp, Lawsonia intracellularis
ctttccctgtagtatattaatcctagaatgaatatattaattacatttcactaacggtaatagcgctaaactcgcatacttctacgcaagattcacaaccaatacattcttcttcattaacaggaacagatttttcatccatcatttcgaaaacttctactgggcaaacatctatacattcaccacaagaagtacattta

SEQ ID NO: 6299 - DNA, 200 bp, Lawsonia intracellularis
tcaggatcaacaataacactccaagccattatggtcctccagttttcatacacctaacaagctctattttatatgttaactgcctttagcttcttgtcatagaactgtcaataggcgacaatgacttaacaatagttttaatgacaatatatatatatattaatgcttattctttgcttgtaataattgtaatctctgat

SEQ ID NO: 6300 - DNA, 200 bp, Lawsonia intracellularis
caacaaccattgcattaggataatattcccttatagatttaaatagttctattgctttttgaatattaccttgttgttctttaatatctgcaaggataaatcctgccttaccttttaattcaattgaagcttcgtctgactctaaaacaagtaaagcataagatgcaccttcatcaaaaagccccattgaagaagcaaca

SEQ ID NO: 6301 - DNA, 200 bp, Lawsonia intracellularis
tctgctctatctaataagcattctagtcggttagttgaagatagtggtaattctaaacaatttttaagataattatttgctatatcaaaacgatgtattttaacactactacttgccaacttacgaagaatgtttgcctgctgttcaacagataatcctggctgaataaaaagtttctcccaatattccatagatttatt

SEQ ID NO: 6302 - DNA, 200 bp, Lawsonia intracellularis
ataatttctaatacgatcatatgctaatgctaaacgccataatacagactttatttgttcaggctggtcttcaaattcactatacatttcttctaagcaactaatcatccaactatcattatatgtaaggtaaccgccaacttctaaaagtttgttccatgcctcaaaacgtaaatctaatctttcttcctcatgcaagt

SEQ ID NO: 6303 - DNA, 200 bp, Lawsonia intracellularis
ataattcaagatacctttctgctgcactccactcttttttttctatatactgataagcttctgtaagattattaagggaagtattagattcgcagccacaacaactaaaaattataaaagaaaatatacctagaaaaaagtggtcaaaaatatttccccaataagttaatatcatattttgaaagaaccttatctaaaaa

SEQ ID NO: 6304 - DNA, 200 bp, Lawsonia intracellularis
tttagctttaactcttaaaatcttatcactaagtattgattgtggcatcatcacaactatcatctactgtgccatctactgtatcaaaaccaacaacatatgctccatcatctaatttcactagtctcacccccatagtagctctaccggcagaacgaacttcatcaacactcatacggattattttatttgtagaggta

SEQ ID NO: 6305 - DNA, 200 bp, Lawsonia intracellularis
agtaaaacaagagcattatcatcagaaactggtttagctcctataacaagaccagttttttgtgtcaccttaaaattaatgattcctttgccgccacgagtttgaactctataaagatcaatactggtacgtttaccataaccaagattagatacagtcataattgctggtgtatcttgtttttcttgaagaataaggca

SEQ ID NO: 6306 - DNA, 200 bp, Lawsonia intracellularis
agcaacaaccgaatctccagggcgtaaagcaataccctttactccagctgctcctcgacccatattacgaacatcctcacaactaaaacgaatagcaaaaccttctgctgttgcaagaacaataaagtcattattagtaacctctttaaccataatcagttcatcatcttcgcgtagtccaacagcaagtaaacctgttc

SEQ ID NO: 6307 - DNA, 200 bp, Lawsonia intracellularis
tacgagacctagcataataagaagcacttgatcgttttaccatccctttacgtgtggcaaaaagaaaaaacttattgtctgaaaattctcttacagtcaggattgttgtcacccattcttctttttctaatgggactatatttgctatatgtgtcccttttgctgtacgactaccctctggaacttgatgaacctttaat

SEQ ID NO: 6308 - DNA, 200 bp, Lawsonia intracellularis
tgatgcattcttcctttattagtaaaaagcaataaaaattgatgatttgttgttgttataaactcttgtacaaaatcatcttcacttgtatgaagtcctgcaacaccttttcctcctctacgttgttgttgataaattgcaagatttgttcgtttaatatatcctcttctagaaagtgtaattacaacatcatcatcagg

SEQ ID NO: 6309 - DNA, 200 bp, Lawsonia intracellularis
aataagatcttcaatttctatatttgtaagggtttcacgtattacttctgtacgacgaggggttgtatacatttctttgattccagtaacttcgtcacggataacaccccaaagaatttttgtatctccaaggattgattcataccaagcaatttttgtttgtaactcatgcatctcttcttctaatttttctctttcta

SEQ ID NO: 6310 - DNA, 200 bp, Lawsonia intracellularis
aacctgttaaccgttgtaaacgcatatctaagatagattgtgcttgaatttcagaaagagaaaaacgttctataagtcgtatttttgcttctgcaggagtagaagaacttcgtattaagtttacaacttcatctatatgatcaagagcatgaataagaccaattaaaatatgtaatcttgcttctgctttgttaagttca

SEQ ID NO: 6311 - DNA, 200 bp, Lawsonia intracellularis
aaacgagtacgacgtactattacttcacgtctatgatcaagaaagtatgttaatgcactttttatagttaaaagttgaggacggttatctacaacagctagcatattaataccaaaagaagtttctagtggtgtaaatttatataatgcattaataataatctcaggaataacacctttcttaagttcaataactacacg

SEQ ID NO: 6312 - DNA, 200 bp, Lawsonia intracellularis
gattcctttacgatcagactcatctcgtaagtctgcaatcccatcaatttttcgctcattaactaatattgctattttttctaccagactagatttattcaaaccaaaaggaatttctctaataacaatagattgagctcctttttttctctcttcaatttctactttcccacgaactttaactgttccacgaccttttg

SEQ ID NO: 6313 - DNA, 200 bp, Lawsonia intracellularis
tataagcatcataaagaccttgccccacatatataaaaccacctgttgggaaatcaggaccatgtataatgtttaaaagattatcaataggaacatctggatcatcaataatttttaagagagcattacaaagctccccaagattatgcggtggaatattcgtagccataccaacagcaattccagaagaaccatttagt

SEQ ID NO: 6314 - DNA, 200 bp, Lawsonia intracellularis
aacaaattaggaacttttgttggtaatacaataggctcctctaatgagttgtcatagttagggcgaaaatcaacagtttctttatcaatatctgataggaactcacttgctaatcgtgacatgcggacttctgtatatcgcatagccgctggtgcatcaccatcaatagagccaaaattgccctgaccttcttcaagagg

SEQ ID NO: 6315 - DNA, 200 bp, Lawsonia intracellularis
gtctctcatagaaaaatcttgtgccatacgtacaagtgcatcataaacagcactatcaccatgaggatgatatttaccaatgacatcaccaacaatacgagcacactttttaggtggacgtgtataactatttcccagttcttgttgtgcaaacaaaatacgtcgatgtacaggtttaagtccatcacgaacatcaggaa

SEQ ID NO: 6316 - DNA, 200 bp, Lawsonia intracellularis
tagcacgcccaatgataacactgagtgaatactccaaataagattttctcatttcctgttctatagatatatggtgttctgtttgcgacatgtttataatctcacttttacacaaccctaattagtgggtaattggtaaagatatatatttagtatacattgattgacaagctagtaatactaggaaaacattttatcta

SEQ ID NO: 6317 - DNA, 200 bp, Lawsonia intracellularis
gctatttatttaaatatctaggtctcttacatttaatgcattacgttcaataaattcacggcgaggctctacacgttcacccataagttgttcaaatgtctcatttgcctcttctgcatcatttattgttacttgaagaagtgtacgattttgaggatccattgttgtcacccaaagctgttcagggttcatctctccaa

SEQ ID NO: 6318 - DNA, 200 bp, Lawsonia intracellularis
gacctttataccgctgtatatttatccctttacgtgcctcatcaagtgtaaattgataaagtttaaaaagatcattaattgtatgagatgttccactatgaaaaacaataaaatttattccaccacacattgttagaagtgaatccatcacgtcccaagtactggaataaattttagaagcaaaaaaatctgcaggtata

SEQ ID NO: 6319 - DNA, 200 bp, Lawsonia intracellularis
cgtgttttatgtccatttttattttcaaaaatagtaaataatctatctccatcctcatgactttcattttctacagtaatgttgtaacctgatgtatttaaatataattgaatttcttctaatgaagataaaacgtcagaagtaagttttttaggactagtaattaataacataaaaagattttcagaaattcctgctaa

SEQ ID NO: 6320 - DNA, 200 bp, Lawsonia intracellularis
ttcagcatctttagttcgttgtgatatagattctatctgcttcatagttgtaataatatcagaaccttttaaaagttttccactctctgtttgaatttctagttcactacttacacgatgaaggagaaaatcattaagagaaggatcatcttttataaatttttctgatttactgttatgaacacggtatagtgggggtt

SEQ ID NO: 6321 - DNA, 200 bp, Lawsonia intracellularis
gtgctatgtataaatgcccacgttcaataagtccaacatagttacgaaaaaagaatgtaagtaataatgttcgaatatgagccccatcaacatctgcatctgtcatgataacaattttataataacgaagcttttgatagtcagtatcttcttctccaatgccagctcccatagctgtaattaatgctttaatctcttta

SEQ ID NO: 6322 - DNA, 200 bp, Lawsonia intracellularis
tttgctagcatcttatcaaaacgtgtacgttctatatttaaaatttttcctctaagaggtaatattgcttgaatattaggatttcttccttgcttagcagaaccacctgcagaatctccctcaacaataaaaagttcagattcagcagggtttttactttgacaatcagcaagtttaccagggagtgcattatcaaacaa

SEQ ID NO: 6323 - DNA, 200 bp, Lawsonia intracellularis
cgctccctttcttctaacaagttcttttgctcgtcgagcagcttcacgtgctctagctgcatcaatagctttatctattatacatcgaatatcttttgggttttcttgaaaatatgtgtctaaacttgtatatacagctccaccaactattcctgctatttcgctattccctagttttgtttttgtttgtccttcaaact

SEQ ID NO: 6324 - DNA, 200 bp, Lawsonia intracellularis
gtgggtttggtaattttacacttaaaactgctgttaaaccttcacgaacgtcatctccagaaagagtttgtcctttcaacttcttagataaatctggctgaccttttatatatccatttatagctctagttaatgctgttttaaatccagcaagatgggttccaccttcctttgttcgaatgttatttgcaaacgtaagt

SEQ ID NO: 6325 - DNA, 200 bp, Lawsonia intracellularis
gtattttctttataaccagcattatattgtagtgcaaaatcaatcattacaccttcaacaatggattctcttgaaataattgaatgtaatatgctttcacctgtatttatatcttttacaaactgatgaattccaccctcagctttaaaaaggtgtgtttcacttgttctttcatctgtacaatgaatttcaagcccttt

SEQ ID NO: 6326 - DNA, 200 bp, Lawsonia intracellularis
atttaaataagcaagttcttcaaatcgtctttttaatgtttcatatgaatattctgttgtttcaaaaatttcttcatctgctttaaaacgtattgttgttccatgattatcagattcacctatacgttgtaagttttctagtggaacacctcgactatatttttgtttccaacgataaccaccacgtaaaattgttactt

SEQ ID NO: 6327 - DNA, 200 bp, Lawsonia intracellularis
caagttgttcagaaagagcatttacacaagaaaggccaacaccatgtaatccaccagaaactttataagtgtcattatcaaattttcctccagcatggagttttgtcataacaacttggacagcaggaacaccttctttaggatgtatatctacagggataccacgaccattgtctctaacagttatactattatcaaga

SEQ ID NO: 6328 - DNA, 200 bp, Lawsonia intracellularis
tgaagaacaacatcaatccgagtacaaaaaccagccatagcctcatctattgagttatctataacttcataaacaaggtgatgaagtccacgtgtatcagtacttccaatatacatagctggacgcatacgtacagcttgaaggccttcaagaatagtaatagaatctgctgtataatcttttggtattatttcgctatt

SEQ ID NO: 6329 - DNA, 200 bp, Lawsonia intracellularis
tgatgccattaggttatccactagtatcttgtaatagttttttatacttcttctgtataataattttgttcaacaattttcataggcataataattacagtataatctttatcttcatcacctgttattccacatggcccttcaacacttgacattgctaaagtgatagtaggtgattcaaagtgattaaatatttccat

SEQ ID NO: 6330 - DNA, 200 bp, Lawsonia intracellularis
aagacttttagtcggaaatgctattttatttatattacctgtataagtaacatctaggtattcattggcagatcctgtgtcttgcccttgtgcagatagaatgagttcattttcctttatatcaaaataggtacatctatcaccttcagtattaaaaatagatattcgatcaagtgactcaagacaatcttttctttgaa

SEQ ID NO: 6331 - DNA, 200 bp, Lawsonia intracellularis
gtttaagaaaagacatattgtctcctgttagtcgagtgagaaaagctgtataatcaggataggtaaatatcgcccttgggacacttattgtttctttactatctattgttcgtgcaaaaaatcgtttttctgttatagctatttctatttctgtttctcctaaccatttacgaagttctgttatatattttttaggaata

SEQ ID NO: 6332 - DNA, 200 bp, Lawsonia intracellularis
agtattccttcactaggaattttttcacttaactcattatttataaaccgtgttaaagcaaattgatgtccatttaaaccacatacatttatatagttatcattagaaggttgaatataaagacatgaaatagcatcagaaccttcatcatcactaatacaaaatgatactcgatcaatgacttcttgaaaaaagtcagc

SEQ ID NO: 6333 - DNA, 200 bp, Lawsonia intracellularis
tgaccatactacactttcttctgaagggaataaagttaaaggttgaaaccaaatagggtcattaataggcattttatatgtacgacgttcttgttcaagaataagtgttcctgatgttgaatcaaaacgtagacaaagttcttttgcaggtaatctacgaataagatcaattaaatttcttccatttactcctacaagtc

SEQ ID NO: 6334 - DNA, 200 bp, Lawsonia intracellularis
cagtttcttttatatcagcttcataattccctataaattcaatatttgcatctgtagccattattgtcagcgttgaatgttctgctttcatccaaagtgtacgtaaatatgcagcacctgagcgtgcaggaataatatttgcaactttttgaagaccatcaataatgtgttctttatttatatataacaacataattctt

SEQ ID NO: 6335 - DNA, 200 bp, Lawsonia intracellularis
taaatccttattataaatattagggcgttacttgtttatatgtattatatcatgttaatattattaataaaattttatacatttatgtgatattaatagaaacaatatgaacattatctttcatcattttttacatttttacacttttgtataagttcatgtatcatggtgtgtataactcggtcattatcttgtaataa

SEQ ID NO: 6336 - DNA, 200 bp, Lawsonia intracellularis
tgcaattttttttactgaatgaagtacagttgtgtgatctcttccaccaaaaagtcgaccaatagcagggtaggaatatcctagaagttcacgacagagatacattgctacttgacgagctaatactagttgttgctgtcggctttcactaataatatcattagctgaaaaaccataacattctcctacaagcataatga

SEQ ID NO: 6337 - DNA, 200 bp, Lawsonia intracellularis
taagttgtggagaaatagatgttatttctcctgtctgcttaataagtgtaataagttctttttctgaaagttctctattcaataatgttttatgagcaattgttctatgtagaattccagagagacaacgtagactatgacaatgttgtgaaataataagtagttgttcttttggaaggatatatttcttttctttagaa

SEQ ID NO: 6338 - DNA, 200 bp, Lawsonia intracellularis
agttgctgtgcatatctaaatcgaatatcaagatcaggttctgggagttcaccccagagtccaacttcaagacgtgaatatatttctttagatacattccatgttaaaggatgatctgttccagagattataagaatttttttattatctttataataatcaagtaaaatagttagttctaattgaagttcagggtatga

SEQ ID NO: 6339 - DNA, 200 bp, Lawsonia intracellularis
tgatactctttggaagtcatcaatgagaataatatgatgactttgtatatgttctctaaataaaaaaagaggttctttatttaaagaaaaagctaactcatcagtagtggtatatttaaaagaacaggatggtatttttgagagttcattggctattgcccgtaataagtgtgtttttcctgttgtttgtttcccaaata

SEQ ID NO: 6340 - DNA, 200 bp, Lawsonia intracellularis
gaacaaggagttgtgtaatttcttcagatgtatttttaagtatattttcagaaactgagcaaagtatattttctataatagaaataatccaactatgttttccattaataataaaattatcaaaatgttgtgatatgttagtaggttgtgtagatttgttttgttttattggataatataaaggttcttttgttgtaact

SEQ ID NO: 6341 - DNA, 200 bp, Lawsonia intracellularis
tcatcataataaaaattaactccataaccccaaagttcatatgaggtttcttcaaatattttttgaaaggtattagcaaaccaggatccaaaaaaacgatgtggaaaagtaacatatatggatggaggattctcactatgtttgattgttagaggatcaaaccaactttgaagttcttcattagaacaaaaatttttttg

SEQ ID NO: 6342 - DNA, 200 bp, Lawsonia intracellularis
agaggctaaaagagatcgacgtaattgttctttcatctcagtattctttgagtatccttaagaatagcagtaataagttacttcataaatagaatagaattatatattaatataattaattatcagaaagtaatatatgaaacaagcctatctaatcatcataaaagataaagcaaaatattattataaatttagttatt

SEQ ID NO: 6343 - DNA, 200 bp, Lawsonia intracellularis
aggtgttatagttttttctagactttatatgtttacttagataattttttatttattagaaattgaacacatatttgagagtttttcttgcaaaaatattatgtaaaaacatactctactggtgcaatctttttcatttttttcttactattaattggtggatatttcttttttttgaagcataaagaaatattctattc

SEQ ID NO: 6344 - DNA, 200 bp, Lawsonia intracellularis
ccacgggaaaactaatgaaaaaatttttttagaagaaagaagtactagttattcttttttgaacagtaaagataataatacaataataaagaaaaaacaggatgctcaacaggtacacattgtttctggagttgtaaagaaaggtcaaaatagttttgagataataggaacacatgtttcccctgaaaatttttataaaa

SEQ ID NO: 6345 - DNA, 200 bp, Lawsonia intracellularis
tagtcaaagcatcggaacaagcacattctcttaaaaaacttagagttggacaaccatatactctttttaaatcgtcttctaatggaagtttaattcgttttgaatatgagataaatcaaactaaaaagttggttattgaaagtaataattcagaatttaaagcatatcttcagcctatagcatacgactgtcaactctca

SEQ ID NO: 6346 - DNA, 200 bp, Lawsonia intracellularis
tgtatttctggtgtgattcattctaatttatttgattcaattattgctacaggtgaatcacctcttttagccctatcaatggtagatatattaagttttgaaattaattttattagagatttaagggtaggtgattcttttaccatactggttgaaaaactttttaaggataatgtatttaaagggtatggtaagatttt

SEQ ID NO: 6347 - DNA, 200 bp, Lawsonia intracellularis
aggtgtaactttttataataatggttcttgttatgagggctatagatttatagatgataatggggttgagcagtattataatgctgaaggaaagagcttaaagcgagtttttcttaaagtcccattagattttaaacgtatttcttcaaagtatagtttaaacagggttcatccaatttattgtgatgttcgtccacact

SEQ ID NO: 6348 - DNA, 200 bp, Lawsonia intracellularis
tggggatagactatgctgctccatttggcactccagtaaagtctattggtaatggggttattatgaaggctggttgggggaatggttttggaaagatggttattgtaaaacataaaaataatattgaatctatgtattcacacttatctggtttctcttctaatttaaaagtaggaacaaaagttaagcaagggcaagtt

SEQ ID NO: 6349 - DNA, 200 bp, Lawsonia intracellularis
attggatatgtaggtagtacaggtctttctacaggcccacatcttgacttcagaattagggaaaaaggacaatatataaatcctgaaaaaattttcaatcctcgtatgggacctgtttcacctcatcaacttgaaaaatataaagatttcattgttgagataaaatcttatatggatggtaatcgtaatcctgaagaata

SEQ ID NO: 6350 - DNA, 200 bp, Lawsonia intracellularis
tactcctgacagttttttatagatatatacagttaaattaagggattaaatatagtgtcttctattacagaaagtgattttttattatcttcttatatgttctctttacctaaaactcagattgcacaatatccctacgagagagggaaatcacgccttcttgttttaactaaaaaaaatagtactattattcacacaga

SEQ ID NO: 6351 - DNA, 200 bp, Lawsonia intracellularis
tttttcaaaaattgaacactatcttcctaacaattctttacttatagctaataattcccgtgtgttccctgctcgtattttttgctcttatgacaaaagaaatatagaagtttttttattaaccccaatatcttttttagaaattcaagctaaaagttctgatgaacactatggagcatggagtaccgccataggagagt

SEQ ID NO: 6352 - DNA, 200 bp, Lawsonia intracellularis
gccttataagaccagctaaaagggtaaatataggatcaaagctttatttacagcaagagttagaaattgaagttttgaaaaaagaagactttgggcgtcatattgttaaattatgctggaaaggttctttatcaaatatttttttttcctatggggatatcccgcacccaccttatatacatcaaagtaataaggttcag

SEQ ID NO: 6353 - DNA, 200 bp, Lawsonia intracellularis
gataaggaaagatatcaaacagtatactctagattagataagctgggttctgtagcagctcctacagctggattacacttttctgaaacgattcgtaataaattacaaaaaaatggtattagttgggcagaaattacactacacgtgggatatggaacatttagtcctgtacgctgcaatgacataagaaaacatattat

SEQ ID NO: 6354 - DNA, 200 bp, Lawsonia intracellularis
gcattctgagtttgtagaagttcctgaaactacagttcaagctataaaaaaagcacggtttgaagggagacctatttttgcaatagggactactgttgtaagagcattggagggtgtaagtactatttgcggttcccttcaaccttatacaggttttataaatattttcatttctcctggatataagtttagttatgttg

SEQ ID NO: 6355 - DNA, 200 bp, Lawsonia intracellularis
atggattagtcactaattttcatctacctggttcaaccttactaatgcttgtttctgcatttacaaagagaagcataatgattaatacttataataaggctattgaacttggataccgttttttttcttatggagatgcaatgttaattatataagtttgcttaatagtatttagatatattttagatatggcaatagta

SEQ ID NO: 6356 - DNA, 200 bp, Lawsonia intracellularis
aaatttttttgtaactgtttataaattaataacaaaataaattaacatttagttaaaaattttttattcatatatagcgataggttactgcagatttactttctaaagtataataagtatctttctagatatttattatactacagtttacaagccgatatgtgtaactatttgtagtctaagtattttttttttttttt

SEQ ID NO: 6357 - DNA, 200 bp, Lawsonia intracellularis
ttttttaccttcctctaaatttttttcttttttgttaattattgcaaagagatatctgcacacccttccctaatttttctaaaaactttttttagatatttttttaattaatttatattataagaaaatatttaaaaataattaataactttagtctgttagtatatattttttgttttgaataaagtttagtttttatt

SEQ ID NO: 6358 - DNA, 200 bp, Lawsonia intracellularis
gttatagataactatttgatattgttaaaaaaatatttttaacaatatttttctgtttatttttttaacaaattatgtctataaaatatcttgttttcatatagaatcttttttgtattctagctaaaaaattagttcttatataagaattgttaaaataaagaaaagttattgtgatgtaactttataaggataaaagt

SEQ ID NO: 6359 - DNA, 200 bp, Lawsonia intracellularis
aaaaatattacttgtgctgcttaacataagcagtataaaattgttatttgttatatatatatatagttgtttccatcagtaagagagaattgtagttatgtcacatattgaaattattgaagaacgttgtaaagggtgtttattatgtacagatgcatgccctaaacagttgattcgtcaatctacaaaacttaataaac

SEQ ID NO: 6360 - DNA, 200 bp, Lawsonia intracellularis
aaggatataaagtttcagagtttatagaaggtggagagttaacttgtataggctgtacagcttgtgctgttatgtgtcctgatgccgcaatacgagtttttcgaactcggaaggtaaaaagtaagtagtatggagcaaaaacgtattcttataaaaggtaatgaggctgtagcttatgctgcagttgcagctggatgtca

SEQ ID NO: 6361 - DNA, 200 bp, Lawsonia intracellularis
atgttactttggatatcccattacacctcaaagtgaaatcccagaaatgctttcccacttacttccagagagtgggggagattttgtacaagcagaaagtgagatagcagcagtaaatatgttgcttggtgcaggtgcttgtggtgttcgtgcaatgacatcttcttcaagcccaggtatatctctaatgcaagaatgta

SEQ ID NO: 6362 - DNA, 200 bp, Lawsonia intracellularis
tttcatatatggtggggagtgaaatcccaggtgtgattattaatatgacacgtggtggtcctggccttggaagtatagatgcttctcaggcagattattttcagtcaactaaaggtggagcacatggtggtgcaaggacatttgtcttagctccatcaacttgtcaggaatgttatgatatgactataaaagctttttct

SEQ ID NO: 6363 - DNA, 200 bp, Lawsonia intracellularis
cttgcttttatatatcgaaatccagttttaatattgggtgatgctatggttgctcaggtcaaagaacctgtggtatgttggaagccagaaaaaaagttagaagataatgctgattcttggagattaaatggaaataaaggaagaagttctcgtttattacgttcactaaacttaaaagaaggtggacttgcagaacataa

SEQ ID NO: 6364 - DNA, 200 bp, Lawsonia intracellularis
taataatttattaagaaaatatctatcaatgcaacaagatattgaagcagaagagtactttattgaagatgcaaaacttgttgttgtagcatttggatctattggacgtatagtaagaagtgctattaataccttgagagaacagggatataaggtaggactatttcgtccattaacattattcccatatccttcatcta

SEQ ID NO: 6365 - DNA, 200 bp, Lawsonia intracellularis
tgcttgagtcattggctaaacaagggaaaaacttttttgttattgagcaaaatggtggccaaatggttgaagatgtaaggcttgcaatacgtcactacacagatgccaatgtacatcttgttcctgtaggtgtttctataggcgcagaagatcttttacagccaatatctgaattttttaggagaatataatgtctgtag

SEQ ID NO: 6366 - DNA, 200 bp, Lawsonia intracellularis
tacctatagaaatagaagaacctagttatattataacagaagaaaatgcattccctatttcaccactacttaaagaagaaataacacactactgtgcaggttgccatcatgggatagcacaccgtttaattacagaagttcttagtgaaatggccttagcaggagaaacgataggtatagcttctattggatgctcttct

SEQ ID NO: 6367 - DNA, 200 bp, Lawsonia intracellularis
tttatctatgactatatagatattgattgggttgaagctccgcatgggagagcctcagctgttgctacaggagtgaagcgtgcccttccagataaaatagtttttacctatcaaggtgatggtgacttgggtgctattggactttgtgagtcaattcatgcagctaatagaggtgagcatatttctgttttatttatcaa

SEQ ID NO: 6368 - DNA, 200 bp, Lawsonia intracellularis
taatacagtatatggtatgacaggtggtcaaatgggaccaacaacacttgtaggtcaaaagacaactacttctccaaaagggaggaatgcctcaaaagagggggctccattaagggttgcagaaattatggctggtcttgatggtgttgctttttctgctcgttgttctttacactccatgaagcatgttttagctgcta

SEQ ID NO: 6369 - DNA, 200 bp, Lawsonia intracellularis
agaaagctatacgtaaggcctttgatattcaatataaaggtataggctatagttttgtagaaatgttagctggttgtccaacaaactggagaatagatccaagagcagcaaataaatatattgcagatgcaatgattcctgtatttccattaggaacatttaaagatattgtagaagataataaacgaggatagaatggt

SEQ ID NO: 6370 - DNA, 200 bp, Lawsonia intracellularis
atcctatcataatgttgttatagcaggctttggtgggcaaggggttatgcttattggtaaccttttagcgcaagcaggtatggaggctggaaggaatgttacatatttccctgtatatggagcagaaatgcgtggagggacagctaactgtactgtagttatttctgaagaattagttggttctcctgtagttatttctc

SEQ ID NO: 6371 - DNA, 200 bp, Lawsonia intracellularis
ctctttctacaattattatgaaccaaccatcgttagataaattccaacatcgtatctgtgcagacggagtgcaaattgttaatacatcaatgatagaaaaagaagctattgacccatctaaaaaaacagtatgtgttcctgctaatgaactcgcagataaaataggtaatattaaaggtgctaatatggtggccttagga

SEQ ID NO: 6372 - DNA, 200 bp, Lawsonia intracellularis
gcttttttaaaagctacaggctgtttatctcttgatgttgttataagtgcattagaaagagtcatttcttcacattatcatcatcttattcctagtaatatagctgctcttgaagcagggtatactttttatgcataagtcttgactacaatagtcattagaatataatttagcacattatatattatactatttttgtc

SEQ ID NO: 6373 - DNA, 200 bp, Lawsonia intracellularis
tcactatattaatttaagtctttttaacactattagtaagttagatataatttaaaaggcaatgaactgattataatttttagcaactaggtataaatgcttttattatgtgcgagagtggcggaattggtagacgcactggacttagaatccagcggttatgccgtgagagttcaagtctctcctctcgcaccactgat

SEQ ID NO: 6374 - DNA, 200 bp, Lawsonia intracellularis
tatatctataaattagtagcttgtttatagacaagataattctcctacgataaactcatttctttatagaacaataaagaatgcctatttgtgagtcctctttttatttagtattatactattggtaacaataaagtagttatgtatgaaataataagcgttgtattacaagaggttaagtaatacacatttttttattt

SEQ ID NO: 6375 - DNA, 200 bp, Lawsonia intracellularis
tattcatctgttactagttaatcccatattagaacatggcaagtatatgttgcttttgttactataactcaatcaaggagttttgttatggagtttgttcttgagtctatttctcctacaaaaaagaaacttactatctctttaacccctgatgaggtgaatacagctttagatagtgttattgctcaatataaaaaaga

SEQ ID NO: 6376 - DNA, 200 bp, Lawsonia intracellularis
tctttctttaccaggttttcgtaaggggaaagttcctaatagtgttgtctttaaaaaattttcagaagaaattactaataaagcaacagaagagacactaaaaatttatataaaagaaatttttcaaaaagagcatatcaagccactatgtaatttactgacagaagatacagattttattcgtaatgagagtttttcct

SEQ ID NO: 6377 - DNA, 200 bp, Lawsonia intracellularis
ctacattgacctttgaagttttacctgaaattacatttcctaactatgaaggacttgaagttcaccaagatgttgtaaaagtaacagatgaagaagttgcagagcttcttaagaatattcagctagctatggcagagttagtagatgttaaagaagatcgttcccctcaaaatggagatgttgttgatgttgattataaa

SEQ ID NO: 6378 - DNA, 200 bp, Lawsonia intracellularis
ggatttgaaaatggttctccagtaactgatgttagtggtgaacattttgttttaactttaggtcaaagacaggcattagaagattttgagcagttagttaaaacagctaaggttggtgaagaaaaagttggtattgtgaatttccctagagattatgctcataagggtttagcaggtaaaagtattgattttcatattaa

SEQ ID NO: 6379 - DNA, 200 bp, Lawsonia intracellularis
gcttaacagtattaaaacatctattcttccagagctagatgctgactttgctaaaaaagctggatatgaagatatagataaactcagagaggctgcaaaagtacagcttgagattaagaaaaagcaaaatgctaaatcaaatgcaatgaagaagcttataaatggtctattagaacaagttacatttgatgttcctgaaa

SEQ ID NO: 6380 - DNA, 200 bp, Lawsonia intracellularis
caatgctagaaacaagaattgaacgaatattaggagatcataatattcgttcacaacaaacggtgcaggttcaaactggtgaggaacggtcagaatcagaagaagagttatataataatgcaaaagtggaagcattagctgttcttcgtcctcaaatttttcttatggctttggcggaaaaagagaaacttgttgttatg

SEQ ID NO: 6381 - DNA, 200 bp, Lawsonia intracellularis
gagcaagaggtagaaagagctttgtataatatggctattcgtgctagacaagactataataaatttcgtgacgcatattaccgtagtggtttagtttatgagttacaagatcatctccttgcagaaaaggcaatggaacttatatataataaagcaaatgtagtagaagtagagcagtagaaatttttgaggattttatc

SEQ ID NO: 6382 - DNA, 200 bp, Lawsonia intracellularis
ccatgtctttactagaagataactagttaaacaagataaagtcatttaactgacagagttatatactttattagttaattcttatgatatctattatttattaactaatttattatcctaagtatggagatccttaatggatgatatttttaatatgacagtccctattgttgttgaaaataacggaagaaatgaaagag

SEQ ID NO: 6383 - DNA, 200 bp, Lawsonia intracellularis
cttatgatatttactcaagactactaaaagatcgtattgttcttcttggtacagaagtaaatgatcaagtagcatcccttatttgtgcacaacttttatttttagagtcacaggatccagaaaaagaaatttatttatatattaatagccctggaggttcagtaactgcaggtctcgcaatatatgatactatgaactat

SEQ ID NO: 6384 - DNA, 200 bp, Lawsonia intracellularis
attacaccaaatgtagcaacggtttgtatggggcgtgccgcaagtatgggtgctttgttattagctgctggtgaaaaaaatatgcgttatgccttacctaatagccaggtaatgattcatcagccattaggcggttaccaaggacaagctacagatattgatatccatgccagagaaattttacgtatgcgtcaacggtt

SEQ ID NO: 6385 - DNA, 200 bp, Lawsonia intracellularis
aaatgaaattttgatggagcagacaggacagtcacttgaaaaggttgcacaagatactgagcgtgactattttatgacggcagaagatgctaaagcttatggacttattgataaagtcttggtttcccgaaaagatttagatatagagcatgaaaaaacagaataagttatatagtttcctttttgttttagaatgttat

SEQ ID NO: 6386 - DNA, 200 bp, Lawsonia intracellularis
ggaaagtactaatataagttatggctaattcaattaaggtgcataggatttttgaaggtttagtaataattatatctaactattcatccacccttgttttttattagtccttttattaagtatgatttttgcactaactaatgctaactatagcctataaaacccatctgatagattaactaacatatcctcttaagaaa

SEQ ID NO: 6387 - DNA, 200 bp, Lawsonia intracellularis
gattattgttttgtttaattttgatatggtaaggaataagcatgagtagaaatgatgaaaaaaatcctcaattattgtgttccttttgtgggaaaggggagtatgaagtaaagcagttgatagcaggagatggcgttcatatttgtgatgcttgtattgcttcatgtaacgaaattcttgttcgtcaggagttagaaaca

SEQ ID NO: 6388 - DNA, 200 bp, Lawsonia intracellularis
gtagaagagcaactactcacaccccaagaaataaaggaaaggcttgatgagtatgttataggacaggaagaggctaaaaaaattttagcagtagctgttcataatcactataaacgtgttttctatgcagaaaaaatatcttcagagcatggagatgttgaattagaaaagagtaatgttcttttagttggaccatcagg

SEQ ID NO: 6389 - DNA, 200 bp, Lawsonia intracellularis
aagtgggaaaacacttttagcaaagacactagctaaaattctacgtgtaccttttgcaatagctgatgcaacaacattaacagaggctggatatgtcggggaggatgtggaaaatattcttgtccaacttcttcagaatgcagactatgatcttgatactgcaagtaaagggatcatttatattgatgaaatagataaaa

SEQ ID NO: 6390 - DNA, 200 bp, Lawsonia intracellularis
tttctcgtagaagtgatggtccttctataacaagagatgtttctggagagggtgtgcaacaggctctccttaagattattgaaggtacagaagcaaatatcccacctaaaggtggacgtaaacatccacaacaagaatttattcgtatgaatacatcaaatattttatttattgtgggtggagcatttattgggcttgat

SEQ ID NO: 6391 - DNA, 200 bp, Lawsonia intracellularis
aaaattgtagagcaaagaattcgtggtggttccatggggtttggggctaaagtttctggtaaaaaagagcgtcctcttggacaactacttgaacaggtacatccaaatgatcttgttcagtttggacttatcccagagtttgtaggtcgtatccctgtattaacgcatgttgatgatttaagcgaagaagatcttgttag

SEQ ID NO: 6392 - DNA, 200 bp, Lawsonia intracellularis
agtgttagttgaacctaaaaatgctttgacacgtcaatatcagaaattgtttgagttagacaatgtaacattaaggtttacatcagatgccttaaaagctattgcgcataaagcaattgaacgtaaaacaggtgctcgtggattacgtaatgttatggagtcaattatgcttgatattatgtataaacttccttctatgg

SEQ ID NO: 6393 - DNA, 200 bp, Lawsonia intracellularis
ttggggtgaaagagtgtgttattaatgatgttgtgataaatactaatggtgagccattgtatatttatgattcagaagtacaagtagctctataattggaagaaaagattaaggtaaataaaattagttagttataaataggtatagctagagaaagtttatgtctgtaaaaggagcttttcatgcatacattaggagat

SEQ ID NO: 6394 - DNA, 200 bp, Lawsonia intracellularis
gagcataaacaaactttagatgatgagtatgttgaactgccccttatgccattgcgtgaagtggttatgtttccccactctattattccattgtttgttggtcgagaggcatctataaaagcaatagagcatgctgtaactaattatgatagaaaaatttgtttggtagtacagcgtgaaccagaagtagagaagccttc

SEQ ID NO: 6395 - DNA, 200 bp, Lawsonia intracellularis
tcttgaaagtttatatcctattggagttgtaagtagaattttacagtttttacgtcttcctgatggcacaataaaagttctttttgaaggtttatatcgagtacattgggaacacttagactctgagaaaagtattgaaagttttcataaagttatggtgaaagctgtcaaagaatctacagcttcttttctagaaagtg

SEQ ID NO: 6396 - DNA, 200 bp, Lawsonia intracellularis
aagcacttgttcgtgccacccatgaagccttagaggaatacacaaaaaataataaaaagattactcaagaagcattagctgccatttcaggtttacgtgatcctggaagacttgctgatgctataatgcctcatttaaaagtagactacattgagaaacagtctgttttagaacaattagatcctgttgctcgtcttgaa

SEQ ID NO: 6397 - DNA, 200 bp, Lawsonia intracellularis
aaagtatatgagctattgagtggagaaattacagttagtacaattgaacggagaattaaaagccgtgtgaaaactcaaatggagagaaatcatagagaatactatttgagtgaacaaataaaggcaattcaaaaagagatggggcgagatgatgatcctcaagctgaattagctgatttagaaaaaaaactttttgaaaa

SEQ ID NO: 6398 - DNA, 200 bp, Lawsonia intracellularis
aaatatgcctgaatatgcaagagaaaaaggtttaagtgagttaaaaaaacttaaacatatgtccccttctgcagcagagtatgcagttgtccgtaattatgtagattgggtttatgagcttccatggaatgaagtgaaagaaacagagattgatatttcaaatgctagacaaatacttgatagggatcactatggtctag

SEQ ID NO: 6399 - DNA, 200 bp, Lawsonia intracellularis
aaaaaccaaaacaacgtattttagaataccttgctgtacaaaaacttacaggttcttgtaaagggactattttgtgtcttgttggtcccccaggagtaggaaaaacatctttagcacgctctgtagctaaggctacagagcgtgagtatgtcaggttgtcccttggaggtgttcgtgatgaggctgagatccgtgggcat

SEQ ID NO: 6400 - DNA, 200 bp, Lawsonia intracellularis
cgtcgtacctatgttggtgctatgccaggtaaacttatcactgctctaaagagggttaagtataataatccattattttgtcttgatgaaatagataaaatgagtgcagactttagaggagatcctgcttctgctttattagaagtgcttgatcctgaacaaaatagtacatttaatgatcactatcttgatttagacta

SEQ ID NO: 6401 - DNA, 200 bp, Lawsonia intracellularis
tgatctttctcagattttttttattactactgcaaattcacttcaagggattcctgctccactaaaagatcgtatggaaattatagaactttctagttaccttgaagtagaaaagaaacatattgttaaagattttcttttgcctcgacaggttataaaacatggattaaaacctgaaaatatacgtatttctgaaaatg

SEQ ID NO: 6402 - DNA, 200 bp, Lawsonia intracellularis
cattaacagaggttattcgttcttatacaagagaggctggagtacgtaatctagaacgtgaaattgctgctctttgtcgtaaggttgctataaaacttgttgaaaagaatgatatggataagactatttctattacacgacaaaacttaggttcacttcttggtgtgaaaaaatatcgtataaatgagagtgaaaaaacg

SEQ ID NO: 6403 - DNA, 200 bp, Lawsonia intracellularis
cctaaaattggtgttgttaatggattagcttatacaagtgtaggtggtgtattacttaatgttgaatcagtaattatgccaggtaaaggaaatgtctctacaacaggaaagttgggagaagtaatgatagagtctgcacgtgcagcactttcatatgtacgttcccgttctgatatgtttggattaagaccagatttcca

SEQ ID NO: 6404 - DNA, 200 bp, Lawsonia intracellularis
tagtgaagtagatattcatatccacttcccagaaggagctactcctaaggatggtccttctgctgggatagctatcacaacttctcttgtatctgcattattagggattcctgttcggcatgatgttgcaatgacaggagaagtgactttacggggacgtgttttacctattggaggattgcgagaaaagttgttagctg

SEQ ID NO: 6405 - DNA, 200 bp, Lawsonia intracellularis
ctagtcgtgcagaggttactactgtaattgttcctcgtgaaaatgaaaaagatttaaaagaagttccagaagaaattctcaaagctttacatattcagtttgtagaacatatagatgaagtcctacccttggctttaatttctgaatcagaagatattttttcagaaatacatactgatgagccatttactacttcttta

SEQ ID NO: 6406 - DNA, 200 bp, Lawsonia intracellularis
cgacgacatactgtagaaataactacagcacaataataactataataaaatatagctatcttaacttgttgcccagtatcctatactaataagtttcccatcttgaggggtccattcaccacaagattcaaaatatttcataacctgttgacactcaatagggatataagagtcagggaatgatgtatagtattgtttga

SEQ ID NO: 6407 - DNA, 200 bp, Lawsonia intracellularis
aaaagtaggcaagatcttcaaataattcgagccaatgcccttcatcacatagaggtaaattatttaatgtatggaagaaatgttgtttaaaaggacaattttttgggatagttttatccattggctctgctaattttatgagttgttgtataccagagcaaacaagttttcctaatgatgtattatcatcaaggacccta

SEQ ID NO: 6408 - DNA, 200 bp, Lawsonia intracellularis
agtacattaagagcctggctcattgtagtgattttttctttaaacatataataccttataaaaaatatttgatatttgatataggttatatgaataccttttaacttctgtcaacctgctaatttgatagtctatctatttttattaacttactattatttttttactaatttattataataggtttattgtgatccatg

SEQ ID NO: 6409 - DNA, 200 bp, Lawsonia intracellularis
ctaaattcaagtcaatgtctgactataaaaaataaagtttattaaagaagatgagcaataaaaaataaatatactaaaaagatagcagtgttattataattttttttattgttgggaggaaagtttctatttttctagaattggaatatatacatatagtcttagaagctaaatgattttatttatgcagctaatattta

SEQ ID NO: 6410 - DNA, 200 bp, Lawsonia intracellularis
aatacattatactttacccaataataaaaaaaggctatttagttttgtagagtcataaaaattttttgatagaggtgcaccatgggagaaaataaaacacatggtatccttatcttaccatttattttaagtatattaggtatccttttctgtttttggaacttattagctccatctactgtaccatgtatatcttctgg

SEQ ID NO: 6411 - DNA, 200 bp, Lawsonia intracellularis
ctgtaatctataccaaggtggtgaatttggtggattaacattttggtggtttggtattttgggatttggacttcttgctatattagcagtaattgggagggctaaattaggattatttattgctggagttggattatgtattgatattatcttatttataactatggtaatgacacttccttgtatggcatgtatgtttg

SEQ ID NO: 6412 - DNA, 200 bp, Lawsonia intracellularis
ttgggttattacttgctttaacattttatttttttaggaaaagagtttttttagctgagtcagattcagaagatgtagaaaataatcgttctttaatattaatatgttggtggtttttctttttattaaatataattctagtgattaagggtgcagtccccccatgggctttacctgttggagataccagttcttcatca

SEQ ID NO: 6413 - DNA, 200 bp, Lawsonia intracellularis
tctgttgcgatatatttttcaccttcatgtacggcatgtcaaaagcttataatgaatttagcagagtctgaagttcaaaaaagttcatggtatcctgtggcagaaaagtccagtgatattgcagtgattgctaaacttgaacagcttcttaaaagtaaaaaatttacactagcagaagctttttctttatctatctcaac

SEQ ID NO: 6414 - DNA, 200 bp, Lawsonia intracellularis
tcagccactcactacattagaaaagttatctcccaaccatgtattgttacagttaaagttgtggattaatagatctcatgttttaaaagatggagatgggcgtatgcctttattagagtttaggggtacaccagctatgttgctttctagcattaagacaaatcatttgcctgtagtaggtaaagatgatgatatgcttt

SEQ ID NO: 6415 - DNA, 200 bp, Lawsonia intracellularis
ctttggagtttgataaagtaggaatatgtggtgagggtgatgcacctaattctcaatcatgtactgaataattattactatcggataccaatccacttatgtgattgtaatcctagtttccaataggggtgtttcatacagtactcaatacatatttgtatattattacttaagtttttgtcatctttaggttgtaaaat

SEQ ID NO: 6416 - DNA, 200 bp, Lawsonia intracellularis
gaaattatcaaactcaagggttaaatatttttcagggtcacagttttgttgaggccaaacaagtttaagttcattccctacagtggttactaactcattcccctctttaggactgactgtaatccaatcaatgtgttttggtaaaggaattgttccatttgtttctatagctatttcaatatggtatttatgtagtaggt

SEQ ID NO: 6417 - DNA, 200 bp, Lawsonia intracellularis
ttataataacttgatttagctgtaatgatggttctccaccagtaaaaacaacatatggtttatagctaggatgggtatagttgttttgaggaaatgtttgaagaatattagctactaattgttcttcagaatctaagataccaaaatcagcgtttaaaaagtctgtatcacagaattgacattttgctattgctctatct

SEQ ID NO: 6418 - DNA, 200 bp, Lawsonia intracellularis
ttttcttttccagaccataaattacatccagaaaaacgacaaaatacagcaggtcgacctgtttgtactccctcaccttgaatggtataaaaaagttctttgatataaaatgacatttattatttttgcctattcaagtaattagttatgtagtgagattaatattaattagctctttttttcattaaaaatgtttccca

SEQ ID NO: 6419 - DNA, 200 bp, Lawsonia intracellularis
tccattttttcgaagtttgcaagctggacatgtaccacatccatatccccactcatgagatgtagtatgatcattaagatagcatgagtgcgtctcattacgtataagatctacaaatttagagccacctaaatgtagggcaagttcccatgtttgtgcttttgtaagccacattaaaggggtatgtattgttatatctt

SEQ ID NO: 6420 - DNA, 200 bp, Lawsonia intracellularis
cccctagtcctagacttaaagccagttgggttgcttttatactgttatcttggcagtctgggtaaccagaaaagtcagtttcacaggtacctattatgagatggcgtatactatttctccatgcaaatgctgctgctattgtgaggaagaaaatatttcttcctggtacaaaagtatttggaaggccttgtttgtcaaaa

SEQ ID NO: 6421 - DNA, 200 bp, Lawsonia intracellularis
acaatttccaactctgatgttatagctgtctcacctagttgagaaaaaatatcaagagaaaaaatatagtcttcacccagtcgttgttcccagatttttgacagttttgatattttattccgtatattagtgcgacattgcatttcaacactatgtcgctgtccataactaaaaccaatagtaatgatatggctaaagtt

SEQ ID NO: 6422 - DNA, 200 bp, Lawsonia intracellularis
agaaagcgcccatccaagacaagttccagaatcttgtcctccagaaaaaagaagtaacgctttttgatttagatgatacatattaattatagtatgagcttatattgataattagttttgttaagattgtttttttaagagcataattatatataattattataatgatgtgaagagatgttatttttcttttttaacta

SEQ ID NO: 6423 - DNA, 200 bp, Lawsonia intracellularis
taaggttattaaaatagcaagattaaaataagaggttttttatggatcaggatgcttgtactcatagtgctgctcttatcttagctgcaggtaaaggaacccgtatgtgttctaataaaccaaaagttcttcatacactattaggagaaccactattattccatgttatttcagcactaagaccactatttggaagtaat

SEQ ID NO: 6424 - DNA, 200 bp, Lawsonia intracellularis
atttgggtagtcattggccatggttcatctcttatacagtctatatgtagtgacctatcgttaaattttatttatcaagaaaaacagcttggtacggctaatgctgtgtcaatagctctaccggtattacaacagtcaagaattaaacgacttatggtaataaatggagatatgccacttattacatcagatttacttga

SEQ ID NO: 6425 - DNA, 200 bp, Lawsonia intracellularis
atgtatcataaaaaaatctgataagacagactttgtgtttgcaaccttaaaacttcctttacctaatgattatggtcgaattctaagaagagaagggaaaatttattccattattgaggcaaaagatattgagccttcattacaacatgatactactgtagaagttaatgcaggactctattatttttctttagaagttg

SEQ ID NO: 6426 - DNA, 200 bp, Lawsonia intracellularis
tagataaatgtttacctatgattaaaaatgaaaataaaagtcaagaatattactttacagacataatagaactggcagtagaaaatggttatctagttgattctatttattttgaggaagattggcattttttaggagttaatactccaaaagatttgtcgtatgtggagtcaattcagcaagcttttattatagaaaag

SEQ ID NO: 6427 - DNA, 200 bp, Lawsonia intracellularis
ctattacaatctggtgttattattcattctcctgaaagtgtccgtattagtccttttgcaactattgaacctggtgtagaaatttatggtccctgtgaaatttacggtgcttcatatatagcctctggatccattatttattcacatagttggataaaaaatactacaatatcacatgatgtatgtatttactctttttg

SEQ ID NO: 6428 - DNA, 200 bp, Lawsonia intracellularis
tcacttagatacagttattataaaagataagtgttctataggtccttatgcgagattaaggccaggttgtcatttagaggagcaagtttgtataggaaattttgttgaaatcaaaaaaacacaattaggaaagcatgtaaaaataaatcacttaagctatattggggatgctattgttggtgatgaaagtaatattggtg

SEQ ID NO: 6429 - DNA, 200 bp, Lawsonia intracellularis
ctgggacaataacatgtaattatgatggagaaaacaaacatcatacgtttataggtaaaaaagcttttataggaagtaatacagctcttgttgcacctttgactattggagaaaaatcattaattggtgctggatctgtgattattagagacgttcctgaaaatatggtttctatagctagaggaaaacagaaaaatttt

SEQ ID NO: 6430 - DNA, 200 bp, Lawsonia intracellularis
tctaagcggaagtagttttatttggtaatatgatgagatagataatgtatttgtataagtatctcatagaatatagtattgctatcttttaggaaaggacatagaataattttatggaactttttgatcttttagaacagcgagtgatggatttatataaggaaattcttcttctccgagaggaaaataacatgttaaag

SEQ ID NO: 6431 - DNA, 200 bp, Lawsonia intracellularis
gtaacctctgttggtcttgctgagatgagagaagagaatcgtgtacttaaagaagcattagaaagagagcagagtattcatgagcagatccataagcgtattgataacttgcttgcaacaatacatgaaactaacataccatcctagtggtagtgtaaaccataatgcataattttcaattcaatgtccttggtgtggac

SEQ ID NO: 6432 - DNA, 200 bp, Lawsonia intracellularis
atctcttttaaagctcaagcagatcctgagcgaattgagcaagcaagagcttttatagaagagcagtatgaaaggttaaaaaattgtggaggacagcttagcagagataaactgctagtgcttttggttttaggtgtagtagatgacttattgcaatcacagcaacagttagatgagcttgaaagccgtttttcatcatt

SEQ ID NO: 6433 - DNA, 200 bp, Lawsonia intracellularis
gctgaaatgtatagaagagataggttagtttaaagcttaaatattatgttgataagatataatatgtgttgataagcctaagaaattacctggggcgtttgtggacttgtatgatgctaacctcacaagtaaaaaaatggaattactattatgttaacaggtgtgtttactccatgtgagtatacctaaacgttagctaa

SEQ ID NO: 6434 - DNA, 200 bp, Lawsonia intracellularis
tagttcccacctggttttattcaggttctgaatctgcatgtatacggcgtccttgggtactatttatataagataaattaacctgttattaggtttaataagttatacataactccttaccataagtccttttattatttgctttggcttagagcttatttgtttcgacattattgggggaggagttatgtcgtttatac

SEQ ID NO: 6435 - DNA, 200 bp, Lawsonia intracellularis
ttgttctctgtacagtaagttctctttttgttggaggaggtacagggatttttctttataaaaaagtgagtaaaaaatatattggggatgcaaaagaattagctatacgtatagttgaagaggccagaaaagaagggcaagcacaaaaaaaagaaattttgctccagggacaaaatgaaatttttaatcaaaaaaaagaa

SEQ ID NO: 6436 - DNA, 200 bp, Lawsonia intracellularis
tttgagtttgattttaaacaaagggagaaggagcttagtataaaagacaaaaagcttcaggtccaaagcgaaagattagaagaacgtcttgaaagagctgcagaaaaagagcatgaaattttaaaagtagaaaaagagctttctattaaagaacgtaatcttttaactcttgaagagcagctaaaaagtcgtatagatga

SEQ ID NO: 6437 - DNA, 200 bp, Lawsonia intracellularis
acaagaaaaacagcttcaaaaaatttccggattaactgtagaagaggcaaaacaatctctatttgaagaggtaaaaaaccgttctcgccatgagtcagcaaaaatgatgcgacttattgaagcagaagctgttgaaactgctaatcgtaaagcaaaagaaattattgcaaatgctatacagcgctatgctggtgattatg

SEQ ID NO: 6438 - DNA, 200 bp, Lawsonia intracellularis
tttctgaacatacagtaactgcagttacactccccagtgaagatatgaaaggccgcattattggtcgtgaggggagaaatattcgtgcattagagtctgcaactggtgttgactttattattgatgatactccagaaactgttgttttatctgcttatagtcctatgcgtcgtcaagtagctaaaatggcacttgaacgt

SEQ ID NO: 6439 - DNA, 200 bp, Lawsonia intracellularis
cttattcaagatggacgtattcacccagcacgtattgaagaaattgttcggaaatgtgaggaagatcttgcaattcaagttcgggaaataggcgagcaagctacatttgatattggtgtttatggtattcatcctgagcttatacgtattttaggccagttgaactatcgtactagttatacgcaaaatgtgttacgtca

SEQ ID NO: 6440 - DNA, 200 bp, Lawsonia intracellularis
ttctatagaagttgcatcattatgtggtatgatggctgcagaacttggtgttgatatcaaaaaggcaaagagagcaggtttactccatgatataggaaaagctgttgatcatgaagtagaaggttctcatgctattattggtgctgagttagcaaaaaaattcaatgaaactgaagagattgttcatgcaattgaagcac

SEQ ID NO: 6441 - DNA, 200 bp, Lawsonia intracellularis
accatgaagagaaagggaaaccagaaactgcccttgctattcttgttcaagcttcagactgtctttctggtgcaaggcctggcgcacgactagagcttcttgaaagctatgttaaacgtttagagcatcttgaaaatattgcaggtgaatttgaaggggtatctaaagcgtatgctattcaagcaggacgagaggtccgt

SEQ ID NO: 6442 - DNA, 200 bp, Lawsonia intracellularis
gtaatggttgatgcagattccataggtgatgatcaaacataccttttgtgtaaagatattgctggaagaattgaagaaagtttaacatacccaggtcaaattagagttacggtaattcgagaacatcgtgctgttgggtatgcaaaataactgagatatatagtttgttaatatttatagagagcgttattacaaactag

SEQ ID NO: 6443 - DNA, 200 bp, Lawsonia intracellularis
gtagttaattagatgtaacttatcttgttaaaatgagatgtagaacattaatgcgtattgctactattattttacactatgggaatccaaagcttacagaaaaagtatatagagcactttgtgaaaaaacttcacaaagtgatattgtagaatcttctatctttgtttttgataatgcatctcaagtaccatatcctaat

SEQ ID NO: 6444 - DNA, 200 bp, Lawsonia intracellularis
gcatggaagcgtagtagttcaaatttgtattgggctggtgctctatcttattgttttcttcttgtaaaagaaatggggtttacacatttatggtttcttaataatgatattacatttatagggaatggctcatatttagcaaaagcgtatgcttctattcaacgtatagagagagcaacaggaaagttagttggtatatg

SEQ ID NO: 6445 - DNA, 200 bp, Lawsonia intracellularis
gagtccatctttaatgtataatagctatcatccacaaatgtgcaataggaaagatttttcttatagtcaagtgaagctgatagatggtgtagctgcactatacaaccttacatgtcttgattctataggtggcatagatgcgttggataacttatatggatatggcgtagatttatggatatctatacgttctgatagaa

SEQ ID NO: 6446 - DNA, 200 bp, Lawsonia intracellularis
aagggtggcttcttgtagtagatcactctatggttatacgtcatattcaacatggctccgccaaaaatattaagggctttatagagactgctgctttttctgaagaagttttttttagaaagaggttaggaatagagtggaaacagcaaattgaaagtatgaaagaacaatattcatcatttactttttgataataaata

SEQ ID NO: 6447 - DNA, 200 bp, Lawsonia intracellularis
ttttttagtttactttaaagattattgattaatataggaataagtatagttattcactaactagttgtaatatctttagtcctagtgaataataatgtatttcattgtgagcattcccatggctgcattcattatgctaataagaaataataccttatagtgtgaaggttctatcccggctactgcaagaatacgtccca

SEQ ID NO: 6448 - DNA, 200 bp, Lawsonia intracellularis
tatattggagctgtccacccattagaaatatcccaggaataagtatactaatatgggtgctattaaggataccttcagtgcagagactagccgctacgccaacacctcccacagctgaaagccatgaagtaagcaagactgtcatagcttcaccaggtaaactaaatattgacataataggggcaaatagttctccaata

SEQ ID NO: 6449 - DNA, 200 bp, Lawsonia intracellularis
atttttagtaaccctattatatttaatgcttgtataagtacaaaagccataatgacgtttggcaggagattcatggttcccatttgccagcctttacgtaatccagctataaagacatcattaatattttgtttaaccatgggtttgctctatagtaacatttttttgtgtaactagtataaggtaaagacgtatgacgt

SEQ ID NO: 6450 - DNA, 200 bp, Lawsonia intracellularis
tcattcccaccactttatagaaaagtataacacacaggggaataataatttttacagaaagaaatgggaataaggctaaacctgtagtaagataatttgtgactgctgctcctgcagaaaattgaaaagcaccaaatattgttctttcattattagaaataaagcctttatcatacagctctcgagtcattacactagca

SEQ ID NO: 6451 - DNA, 200 bp, Lawsonia intracellularis
gaatcagagctgtgtagactgctaataagtgcaagccctgaaatcccaggtaatccaaacaaaggtttcattaatggcgttaataagtgttgtgcagcatatagtgcaccaaggtgttcagcaagttctacaatcccaagtgctaacataatcccagggataagagaaagactgaataaaaatccctgacaagctccaga

SEQ ID NO: 6452 - DNA, 200 bp, Lawsonia intracellularis
accacctagtcctacaaatgtagtaggtgttgagtctcctattgttccaaacttaccaatgaatctactgaagtccatgataccaagccagttttgaaattttgagaaatatccagaaaaaaagaggataacaagtataagtataatatatgaacttatttttatttttttactttggtcaatttggggtatatgggtat

SEQ ID NO: 6453 - DNA, 200 bp, Lawsonia intracellularis
tcttttccattgttatttttgccccttattataagtttggttgtattatcaaaatataatatttttatttactattaaattgttgtgaaaaaattttatatgctagttctttagctttagctctatttactttatctgtatcggtttttggtaatttttgaacctgaatgacatgtttagggcaccagtataaaggtagg

SEQ ID NO: 6454 - DNA, 200 bp, Lawsonia intracellularis
ttggctttacaaatagctaagtaatcacatacttttttttctacaaggataacaacaagttctccgaatttatgatcaggaatagaggttattataaaaggttgtaatataaatttttttagtagattttctactagttcaatttgtatttttattcctccactattgattatattatcttttcgtccaattattcggaa

SEQ ID NO: 6455 - DNA, 200 bp, Lawsonia intracellularis
attaccacattcatttacttcagcaatatcatttgtaacaagtggttttttacatatgtttggagcagttataacaagtgttccttctggtgataatgagacttttatactcttaaagggtgtataccactcagaagcatttactccattgagtttcctaagggcaatatgtgaaagtgtttctgtcatcccatacgttg

SEQ ID NO: 6456 - DNA, 200 bp, Lawsonia intracellularis
accaaacagcatgagggaaatctgctaatttttttgatagtgatgtatcaatagatcctccaccaataataagatgtttgatattttttagatatgttgtgtcttttttatattcaagtgttgtacagacttgcataggggtcatagcagcgaaagtaggtgaactttttatttgtttaagaggtctacttgatggtgta

SEQ ID NO: 6457 - DNA, 200 bp, Lawsonia intracellularis
acatagagtaagttaagtccagcaagtaaggagcgaactacaaccatttttgcaccaatatactttagaggcatgcatagtaaagcagtatcgttaggctttaatcctaaaaatgaacatgttaaataagcactttgtagcatacaagttttttttacatggagagtttttggcttccctgtagagccagatgtagatac

SEQ ID NO: 6458 - DNA, 200 bp, Lawsonia intracellularis
ttgaattgtgattgactgattaaaccattccttaagaaattgaaaaagttcactttgaattttttcattcttgttgttttttaatatatttgttttagaaaatttttccccattgataaggatagattgtctttctatattaaattcaaacatatgtttatctttaatttgagaaatatcttactaagatcgtgtaaagg

SEQ ID NO: 6459 - DNA, 200 bp, Lawsonia intracellularis
tattattactagctagtggggattaatttaataatattttgtgtggttatattaaggtaatttggggtattgcttaaagttaggtttacgtttttctaagaaagcattactaccttcttgtgcttcatctgttagatagtaaagcatagtcgcatcaccagcaagttcttgaattccaatttgtccatcaagctcagcat

SEQ ID NO: 6460 - DNA, 200 bp, Lawsonia intracellularis
ttagaccagctttaatcattcttaatgctaatgggctatgttgcattattatttctgaccatgctacggtttctttttcaagatcttttagtggtacaaccttatttacaagacccatcgtaagagcttcctgtgcagtatattgacggcataaaaaccaaatttctcgtacttttttttgtcctacaatacgtgctaga

SEQ ID NO: 6461 - DNA, 200 bp, Lawsonia intracellularis
tatgatgagccaagtccagcatcaaagctccccacacgaggtcctgtttgaccaaatattgcattttcagatgcaattgttagatcacatacaatatgtaatacatgcccccctcctattgcataaccattaaccatagcaataactggtttaggtagaaagcgaatttgtttctgtacatctaatatgttaaggcgtgg

SEQ ID NO: 6462 - DNA, 200 bp, Lawsonia intracellularis
gacaccattttcatcaatatatccaccacgacctttaacattcatatctcctccgctacagaaggctttatcacctgaacctgttattataacaacagcaatatcttggcattctcggcaatataataatgcattactgatttcaaatgttgttgtaggagtgaatgcattacgataacgctctctatttatagttattt

SEQ ID NO: 6463 - DNA, 200 bp, Lawsonia intracellularis
ttgctattcctttgtaatattggaataaaatttctttatatgttgtaatggattcccatgcataatttgacatataattatactaacctttatttgagttactttttataatatggtttacaacacgtgctgttgaaactatctcttcttcctcatttacaatatctatatgccatagatgtgtggtatttcctttatgt

SEQ ID NO: 6464 - DNA, 200 bp, Lawsonia intracellularis
ataatttgtcctttccctttaacaagtttaccaataggaacatttttaatatggttcccactaacttgaattccacatgggaattcattttcaagacataataaatatgagccatgacctgcaatactttctgctaatgcaagggatgcacctccacttaagtaaccaaatggttgagatgtatgatttgtcacaggcat

SEQ ID NO: 6465 - DNA, 200 bp, Lawsonia intracellularis
agaggcaatcactgtacctagtttactctcatggaataggataccaagatgtccaataagagaatttttgtatttagtattgtatgttattatgttatgttgttgagagtttttcataggtatattgggagaggataaaatattttaataagttagctaataatagagctgggctatatagagttattataatatactgt

SEQ ID NO: 6466 - DNA, 200 bp, Lawsonia intracellularis
taatattattaggtctagtttttcaataactgaaaaattttttatttggaaataagttttaatatagtaaaaagcctctacagttaaaactgtaaaggcttaagattttctggagccagcatggagagttgaactccagacctgctgattacgaatcagctgctctaccaactgagctatgctggcaagtatatataatg

SEQ ID NO: 6467 - DNA, 200 bp, Lawsonia intracellularis
ccctaaggctacatatcttgccactaactgcaagtcaagcaataggaaattagtattatgtactattttatattattttttcattacttttttcatattatctatagtcatatctttatctgtaaggtattgtccatcaggaagaagtgtaacatcccctgccttatctaatggtaacccaatccaactagattcattcc

SEQ ID NO: 6468 - DNA, 200 bp, Lawsonia intracellularis
catttttatctgttacagtaatatcccatgcttcagcattttctgttctactgatttcaaccattgctttatcaccatttttaagggtctcttcttgtaaaagattttcttcccattgattagcatttgttggggaaacttttaatgtataaatgtccatttgggagccattcatgatatcaagctttttattaagagcg

SEQ ID NO: 6469 - DNA, 200 bp, Lawsonia intracellularis
aaaactgattctgcagcagataaaacacatacaatagaaagtactataactaaacgtttcataattcctttctccttttgtgtttaggggaaataacttctccttaatactaatggcttttaacataatacaagtgtattactagtaactctgctagacttttactataagcatttgaaaagaagaggctatagctgtta

SEQ ID NO: 6470 - DNA, 200 bp, Lawsonia intracellularis
taataaatataacagtaaatttggattataattatttataagttatgttatagttgttataaatcatattagatctatgtattgctttgactaaataaagtgattatattatttatacctagtcttaatttatatctatagagatacaaatgaactgactcagtatagttgagtgggtgcatttttggaggttaaaatgg

SEQ ID NO: 6471 - DNA, 200 bp, Lawsonia intracellularis
agattcttcgtgatggtaccaaaggagttgcatcctctgttacttctatatttatgagatatgtttattggtggatgaccataggcttgttagtgacagcaggatcagctttttatgttgcaaactcaccagctttacttcaaacattattcagtaatacgttaagccttgttattcttgctatagctgttattgctctt

SEQ ID NO: 6472 - DNA, 200 bp, Lawsonia intracellularis
cctcttgttttaagtactatgatctcacgtttatcttctactgcagcaacattgttatttattttatatagcttgttaatgggggcttttttatcctctgttttagttgtttatacaggaacatctgttgtacaagcttttgttacaactgcaggaacttttgctgcaatgagtatttatggtacagtaactaagcgtga

SEQ ID NO: 6473 - DNA, 200 bp, Lawsonia intracellularis
cttaacaagtatgggaagttttttgactatggggttaattggtttaattatagctatggttgttaatatatttttaaaaagtccaatgatggaatttattattagtgccattggtgtattgatttttacaggtcttacagcctatgatacacaaaaaattcgtacatttggtgagaatgcccctttaaatgattctttag

SEQ ID NO: 6474 - DNA, 200 bp, Lawsonia intracellularis
ctatacgacgtggggctcttttaggagctttaacactttatcttgattttattaatttatttttaatgatgttaagacttatgggcgatcgtcgctaatatttttataatttttatttatgtaaggcttttattaagaataataaaagccttatttttagttagataaacctataaaagagaaaaagtaaaaaaaagcaa

SEQ ID NO: 6475 - DNA, 200 bp, Lawsonia intracellularis
tacctataatcgctgatgcagggattgtaatcatccatgctttcacaagagttattgctacaaaccaccgaaccgcagaaagtcttttagtagaaccaacaccaaagatacaagctgtaatagtatgggtagtacttataggagcacctaatattgatgcaattgtaatcaccgctgatgcagatgtttctgcagcaaac

SEQ ID NO: 6476 - DNA, 200 bp, Lawsonia intracellularis
ccatgtactggttctaatttaaagatgctattacccatagtttttattattttccatccaccaacagctgtaccagcagccattgctatagcacagactacttttacccagaatggtactgtaatagattcaattttattaaaaataaagagggcaagagtaataacacccatagttttttgagcatcatttaaagcatg

SEQ ID NO: 6477 - DNA, 200 bp, Lawsonia intracellularis
gcttgtagccataaaggcagcagaaagaatttgtagatgtgtaaattttttagtgagttttttcctatgagttttggcaaataggaaactaagaagagtcataaagctaaatccagtaaaaaaacctaagagaggtgcaaggaataagggtaaaataatcttttgtaagatggataagatattaagactagtaaagccag

SEQ ID NO: 6478 - DNA, 200 bp, Lawsonia intracellularis
cagatatgatagaagatccaataagtccaccaataagtgcatgagaagaagatgatggaataccatagtaccatgtaataaaattccaagttattgcaccagatagtgctgcaagaactagtatttgatttccagatacaacttctgtgttaacaattccttttcctaatgttgaggcaacctctgtgcctaaaaatgct

SEQ ID NO: 6479 - DNA, 200 bp, Lawsonia intracellularis
ccaagaaggtttaaaacagctgccattaatacagctgtctgtggtgtaagagcttttgtagatataacagttgcaatggcattagcacaatcatgtgcaccattggtaaaatcaaaaattaatgctattattataataaggataagaaggaggggaatttcaaacatatttaatcatcgttttttctaatatatcagcga

SEQ ID NO: 6480 - DNA, 200 bp, Lawsonia intracellularis
gattcaatgtttgttccatagctagagctaatttatcataatattttgataaaataaaaagttctttagtagtactaatgtcagtaaagttaaaatcttgtattttttttaaccccattactagaaggattgctccattttcttttttttctctaatttctcgaagattggaactaatatctgtttttttaggaagttct

SEQ ID NO: 6481 - DNA, 200 bp, Lawsonia intracellularis
tttatcatacttagaatatcatctatcatattttgctcgttagcaattagtaattctagagaagatggaatagaattaggtattctgcaataaaaaaatagtgttcctaattcataacaggtacaagataaatatagttgtcctaagttaatagcatgaatatcttctttatctattggtgtgataaatgttcgagagag

SEQ ID NO: 6482 - DNA, 200 bp, Lawsonia intracellularis
gtgttctgtaatagtattatagagttgacttatttcttcttttgtattttgaagtgtttgtatttctatggggtgattgttttttgcttgttcattaattattataagttggtgaatttgcttttgtagaatagtgccttgtttagcaagtaattcaaaaaatggaactgattggggcataaatcgtgccaacattaaaa

SEQ ID NO: 6483 - DNA, 200 bp, Lawsonia intracellularis
gctcctttgatttaaaaaagcactaataagagagtagagatatattgtaaatgctattctgttatattctttaaatggtctaaatagaagattcattagttattttttgaaatagatactattttaattgttatttttttattgtattaagaattaataaataaagagtaattacatttggttcttgattctactttgct

SEQ ID NO: 6484 - DNA, 200 bp, Lawsonia intracellularis
tttttataaataattaaaagatagtataggtacatgacttattacctataattcagaagaagcaatttatatttataaaatgctagtagtattataaattaactataataattttgatccattaacttactatttattataccctatcattatattctatcaatagtaacaagtataaaattcccctaggtagttaaaag

SEQ ID NO: 6485 - DNA, 200 bp, Lawsonia intracellularis
cagtatgataaaaataaactgtaattgctttacgcactccttcactataaatttaataaggaaattttagtaaacttaattaaacttctattataaagaatttgtatatcagtatgttatttttttgtcgagtatagagcctatatttttttgattaaaacattaatatatctatttatagttatatgaatagttttatt

SEQ ID NO: 6486 - DNA, 200 bp, Lawsonia intracellularis
aataactatagaaagtttttagagtaattagtattactaatttcttatagatagatgttagtgatgacgaataatagggtgattagacttttttgataaacgtagtattatggcagcaactataataatagcaaaaacaatgatgacttcccacattttttatcccctttgcaacatagttgtgttaggttttattatta

SEQ ID NO: 6487 - DNA, 200 bp, Lawsonia intracellularis
ctgtgctaaatcattatttgttctttttatgaactcattgttttaagttactaaataattgttccaagtcatttatttaggtttgaatattgtgtagatatgttaacatatttgctctgtccattatgggatatccatctgcaataagtgatccttgtttgttttttctatatgaaatagaattattattattattatta

SEQ ID NO: 6488 - DNA, 200 bp, Lawsonia intracellularis
tttatgatataagatattatttatatagtgaacgttaacagcagcaacagaatatcttttagcagataagtagtataattattgataataatgaataatttttatggagtttagaaggaagaatttttagataagaagttttacataaccttgtttaaaaacttacttgaatagtcgttatatagttagctatttccatg

SEQ ID NO: 6489 - DNA, 200 bp, Lawsonia intracellularis
agttaaaaatagaaattttgacataaatttttgacaggttgttttagtaaatagaagatttattaattggcatattagtgtaagttcatctttttttattaaaatttttattgatttattagtagctaattttgaacgatagtcgttatattattactttttgagttaaatgagtaagtaatagtgggagcaaacaattt

SEQ ID NO: 6490 - DNA, 200 bp, Lawsonia intracellularis
cttttttatagtttcagaggtaaccttagttcgtttagatcaatttttatataataatttatgtacacatggagtttctcgtgaaagattaaaaaaagttattgtatcaggaggttgtaagattgatgataaggtatgcttttctccaagtacacgattaaaagtaggaatgcatatttttattcagctacctgaagttg

SEQ ID NO: 6491 - DNA, 200 bp, Lawsonia intracellularis
tttcagcattgctcccggaggaaggatttttagagattcttttttctgatgaacatcttgctataataaataaacctcccggattaacagtgcatcctgcaccaagctgtcaagagtcaacgttggttcatagattgttaaagtatttcccaaagcttatagagcaaggtggcctacgtccagggattgtacatagaatt

SEQ ID NO: 6492 - DNA, 200 bp, Lawsonia intracellularis
gataaagacacaagtggacttctttgtattgctttaacggaagacacacgtttaaagctctcaaaaatttttttagatagaaagattaataaagaatacttagcgttagtccatggtgttccttctatggagggatatatagcagtaccacttggaagagatccaaaaacaaaagtaaaggttgctgttaacccaaaagg

SEQ ID NO: 6493 - DNA, 200 bp, Lawsonia intracellularis
gaaaccagctcatacagaatggcgtgttttgcatagaggtaaaaatgatgtttattcaatattagcattgacaattcaaacgggaagaacacaccaaattcgtgtacatatgaagcatattggtcatcctttagttggagataaactttatgctggaggacatgttaataagacttttcaatgtaacagacagatgttgc

SEQ ID NO: 6494 - DNA, 200 bp, Lawsonia intracellularis
atgcttggaaattgagttttgagcaccccattacaggcaaaaaaatgaattttttatgtcctcccccaaaagattttttagatacagtatcacttttagaacaagaacctatacggattgttattactggagtcgccgggtctggaaaaacaacagtattaaaatattttgaacaacatagtgatattattatatggagt

SEQ ID NO: 6495 - DNA, 200 bp, Lawsonia intracellularis
gctgataaagctgtagaaaaactttattctccaggaggagaggtttggagtattcttcaagaaagatatggagatagatttgtcccagataaaaatcgttctgtggataaattaaggttgttatctgccctaaatggagaaacagaaccgcttttagatataagagatttaaactatatagtacatcccattatgttaga

SEQ ID NO: 6496 - DNA, 200 bp, Lawsonia intracellularis
acagttgtcaaaattttggggggaagcgttttataaaaaatataaatatgctatagcagaggttccactatggtttgaagtcgatcatatcattagtcaattagtaaaagaaaatagagtttcatccaatattagacccaattttgttataggtgtttcttgtcctgagaatattagagaaaaacgtttaaaggaggctc

SEQ ID NO: 6497 - DNA, 200 bp, Lawsonia intracellularis
gttgctggtcaactgcacataaaactactattgataattggcaatttcatcaagatatgaagcttaaactatgtgactatattgttgataattcaggttctgaagttcagttaaaaaataacatacaggatattatgatgctaatagaagcaaaggttacatcttttcaagatgactttcttcagtttttacagaaaatt

SEQ ID NO: 6498 - DNA, 200 bp, Lawsonia intracellularis
attacataattacacatacacacacacacacactctctctctctctctctctctctctctctctgtttcatgtgaaacatttttatttttactaacatatttttttttttttttttttttttttttttttttagttgtttgacatggtttactctgttgtttatgtataaattttatatagacaactattgtcctttgag

SEQ ID NO: 6499 - DNA, 200 bp, Lawsonia intracellularis
aaatgaaagaaggttattatggctagggttattgctattgcaaatcaaaagggtggtgtggggaaaacaacaacagctattaatttagcagcatcacttgctattatggaaaaacgtgttttacttgtagactgtgatcctcaggcaaatacaacaagtggtttgggtttttctgttaatatgttgtcacatagtttata

SEQ ID NO: 6500 - DNA, 200 bp, Lawsonia intracellularis
ttctgtccttttccaaacaaaacctgttgagtgtgctattatgtctactgtttcttcatttctttttcttcttccctcagggacggagcttgttgcagcagagctggaattggtggataaaataggtcgagaatattatctttcagaattattagctccgctggagaaaaagtttgaatatataattcttgattgtccac

SEQ ID NO: 6501 - DNA, 200 bp, Lawsonia intracellularis
cttctctaggacttattacgttaaatgctctttgtgcggcaaaagaaatccttgttcctctacagtgtgaattttttgcacttgaaggaattgtaaaactacttcagacacatgatcaggtgaaaaaaagattgaatcctaaactatcattattaggaattgttttaactatgtatgatggacgtaataaagtaacacgt

SEQ ID NO: 6502 - DNA, 200 bp, Lawsonia intracellularis
caggttcaacaagaagttatacgttgtttcccaaaccatatttgtgaaactgtaattcctagaaacattaggttatctgaagcccctagtcatgggaaatctattttacattacgatataaagtctaaaggggcagaagcataccttgaacttgcccgtgaaatagtaatgagaaaagtaaaaactgacgtactatcaat

SEQ ID NO: 6503 - DNA, 200 bp, Lawsonia intracellularis
ataaattttttcttttgtagtaagaagttttattgtattttgaagttcttttagtatattttaaccagttattaggaacgattatggcaactcaagaacgtggacttggtcgagggttagatatcctttttggtaatacttcacctgaagttgagcaagatcatataaaaaagcatagtaaagatggattagtgctacct

SEQ ID NO: 6504 - DNA, 200 bp, Lawsonia intracellularis
tcaattacaaaacttcctatagctattttgcgtcctagttcaagtcaacctaggaaaagttttgataaaaatgccttggaagaacttgtattatcaatcaaaaaccaaggtgttgtccaacctattttagtaagaccgtatagagagcaatcatctattcgttatgaaattgttgcaggagaaaggcgttggcgtgctgc

SEQ ID NO: 6505 - DNA, 200 bp, Lawsonia intracellularis
caagttagctgggcttgttgatgttcctgtttatattaaggagcttaatgatgaagatgtattaactatagccttaattgagaaccttcaaagagaggatcttaaccctattgaagaagcattggctatagagtcattaagaaaaaaattatctcttagtcaagatgagcttgcacataggcttgggagaagcagatctg

SEQ ID NO: 6506 - DNA, 200 bp, Lawsonia intracellularis
ctattgcaaataccttaaggttacttcatcttacacctgaagttcaagagggactttgtaatcataccatttcttctgggcatgctagagcactattagcattatctgatatggagttacagcaagtgctttataaagctatttgttgtaatcaactatctgtacgtgatgttgaaacatctgtcacatactggaaaaaa

SEQ ID NO: 6507 - DNA, 200 bp, Lawsonia intracellularis
aatggagtactgccaccttctatcagtggtatcacaaaggatacagtaaaagttaagcaaaaagaaagatcagaacgtcttaaaaatgttgttaatacgttacgttttaacttacatcctaaagtaactatctcaggttcagagtgtatgggtagaattacaatcccttatgattcacaagagcagtttacaactattct

SEQ ID NO: 6508 - DNA, 200 bp, Lawsonia intracellularis
tttaaagcttggaataaatgcttctgatacaattgacacataattactagttagatagttagacatcaattaatttataatctttttatttgtaacaagacaaccaatgttctttcttgttataactaatattaacaagctgataaaaggtataaagtatggttgatagccattctgcagtgatggtcaaatctgatttt

SEQ ID NO: 6509 - DNA, 200 bp, Lawsonia intracellularis
gtacgattattaaatgataagcctgttcttgtcgttggtgatataatgttagataattatcttattggtgtttcagatcgtatttctcctgaggcacctgtccctattgtaaaaatagagaatgaaaagcaatctcttgggggtgcagggaatgtagcaaggagtattgctgctctgggtggaaaggtaacgattattgg

SEQ ID NO: 6510 - DNA, 200 bp, Lawsonia intracellularis
ggctgtaggacaagaccaaagtggagaaaaaattcaagatcttttaagtacaaggggaattttatcttcaattataacatttgcaaatcgtcaaacaacagtaaaaacacgtgtgatggctcacagacaacagatgatacgacttgatcatgaggaaagtacatcatataattctaaagaattagctatggtattaagta

SEQ ID NO: 6511 - DNA, 200 bp, Lawsonia intracellularis
attttgaaaaatatgtatctcaacatgagattattattttatcagattacaataagggtcttgtatcaaaagagtttatgcttggttttcaggatatactgttagctaagaatcctaatgcaaaagtattaatagatcctagaccatgtaacataatgtattatgcattatgtaaaaatatatttgctcttacacctaat

SEQ ID NO: 6512 - DNA, 200 bp, Lawsonia intracellularis
acaaaagaaactggagaatgtgcaggtggtatggctacttctagtcagccagaattgttagctgcaggtcatactataatgaaacttctttctacaaagcatttgttaacaactcttggtgatagtggtatggcattgtttctttctcctaaaaagatatggcatattcctacagtaggccgtgatgtctttgatgttac

SEQ ID NO: 6513 - DNA, 200 bp, Lawsonia intracellularis
tggtgcaggagatacagtaattgctacatttggccttgcattaagtgcaggacttgatccacttatctctgcgatattagctaactatgctgctggcgttgttgttagtcaagtaggaactgcaacagtatctcctgatgagttagaagaagctattacatctttacctcaaccaaaattagctttttggaattaactat

SEQ ID NO: 6514 - DNA, 200 bp, Lawsonia intracellularis
tattcatatactgttagcaactttagatttttttgtatttagtattaattgatacataacaaaaaattcttttattatactattagaaactaattgtcctaatggtgtaagttttagataattactatctatttttataagttgttctttttctaatttgaaaattagatttttatagctatctataaagttattttttg

SEQ ID NO: 6515 - DNA, 200 bp, Lawsonia intracellularis
ctatagtattatattcattaatattaagtccttttgttgttcttaggcgtaacataaaaagttctagtacttgagttttattatcaatatattctttggggggttcctttttcttttctactaataaactccaaagagaaaggtctgctggatttgtccaacgatagtggtttagtgttgaagttgcagatggtccaaca

SEQ ID NO: 6516 - DNA, 200 bp, Lawsonia intracellularis
ccaagataatctttcccttcccaatatccattgttatgtttacattgatagccaggctgagcaaagtttgatatttcatattgtagtagtcctttttcttctaagtatgtttttgtttgaaaaaacattgttatttgttcttcttctgatgggagagtaagttttttattaacatattgtttattaaaaatagtccctgg

SEQ ID NO: 6517 - DNA, 200 bp, Lawsonia intracellularis
ttctagagttaaattatagctagaaatatgatttggtttaagttcagcaacatattttattgtggttaaccatttttgtacagtttgattaggtagtccccatatgaggtcaatattaatatttgtacataatgcatctctaagcatattatatgattgtatagcatcaattatattatgtgtccttcctaaatgatgaa

SEQ ID NO: 6518 - DNA, 200 bp, Lawsonia intracellularis
gttgtttattgttaatagcttgaaaacctaaagaaactcgattaattccagccattaaatattctttaattaaagataaagtggttagggactcagggttagcttcaagagtgatttctatttttgatgttagtctgtagtattgagagatatgttctaatattttgtaaatatattggggtgagagtagacttggtgtc

SEQ ID NO: 6519 - DNA, 200 bp, Lawsonia intracellularis
cctccaccaaaaaaaatagtctctatcgttggtttttgaagtttattcccccagtatgaaagttcattttttaacgtaacaaaatatgtttgaagtttttgttgcccatctatacttgatgtgtctagaggtttagaaaaaaatgaacaataataacaacgagttttacagaaagggatatgtatataaagcagcatata

SEQ ID NO: 6520 - DNA, 200 bp, Lawsonia intracellularis
attaattaaaagaataaattataggtataaagtggattagttaatttttataagataaaaaagttatgaatttttagtgataaaaatctttacattcaataatataagtattatttattattaatgtattatattatatattatcttgtactttccatatatcgtcaataataatttatatttttttgataaatagtttt

SEQ ID NO: 6521 - DNA, 200 bp, Lawsonia intracellularis
ttattgtattatattctataaataaaaaaagaaatgtattacatataccttaatatagttttatccccttccctttaggggtatttttttttttagcctttatcgattttatatcgtttatactaggcatcctatgcaagaaaaaaatgtatttaattggctacataaagacttactggatattgatcagctttctcaga

SEQ ID NO: 6522 - DNA, 200 bp, Lawsonia intracellularis
cagatatctttaatatattaaatacagcaagtagcttagatgaaacaaatagtagagtaataaaaaaattaccaacattgcgtggtaaaaatattatactattttttgctgagccaagtaccagaacaaaagtttcttttgaaatcgcagggaaaagactctctgcagatactataggggttaatgcttcttcttcaagt

SEQ ID NO: 6523 - DNA, 200 bp, Lawsonia intracellularis
attcaaaagggtgaaagtttaaaagatacagctttaaccttacaagcaatgtccccagatgttattgtattgcgtcattcaagtagtggtgctgcattgtttcttgcagatcttttagagtgtagtgtaataaatgctggggatggttggcatgcacatcctacccaagcacttcttgatgtattttcactatggaaagt

SEQ ID NO: 6524 - DNA, 200 bp, Lawsonia intracellularis
ttggggaaatcattttcatggtaaagaagttcttatagttggagatacagcacatagtagagtttgtcgttcaaacgttacattacttaatttaatgggggtaaaggttaggctatgttctcctagaacattacttccctcaggagtagaacattggcctgtagaaatatatacagatttgcatcaagctatttgtggtg

SEQ ID NO: 6525 - DNA, 200 bp, Lawsonia intracellularis
tagatgctgtaatatgtctaagagtccaattagaaagacataaaaagagttttttccctagcatagaagagtatgcaaaacgtttttgtttaactccaaaacacttaatgtctgcaaaaactgaagcaaaagtgttacatcctggtccatttttacgaggtgttgatcttgcatcttctcttattgaaacccctcagtca

SEQ ID NO: 6526 - DNA, 200 bp, Lawsonia intracellularis
ttaatttttgatcaggtttctgctggtattgctatacgcatggctatattatttctttttttaacttgtaatgacttataaagagttaacttatgtcctccttgtttctatataatgcttattatgatggaaagcttgtatcattagaagttagagatggaaagattattacattaaaggagggagaacaaaatagtact

SEQ ID NO: 6527 - DNA, 200 bp, Lawsonia intracellularis
tctagtccaatagatttacatcctgtagatgcaaaacagaaacatcttttccctagctttattgatgttcatactcatcttagggagccagggtatgaatggaaagaaactatagctacaggactagctgcagctgctcatggtggatttggaagtgtattatgtatggctaatacaaatcctgttaatgattcagctac

SEQ ID NO: 6528 - DNA, 200 bp, Lawsonia intracellularis
agtaacatgtaaaatccttgaaagtgggaaatatgcatttcctaatggaccttatgtttatcctataggtgctgcaactatagggcttaaaggtgaacagctttctcctatgcatgaattagcagaagcaggttgtatagctatttcaaatgatggtcttcctataaagaatactgagctgtttcgaaggatattagagt

SEQ ID NO: 6529 - DNA, 200 bp, Lawsonia intracellularis
atgcttcagatttaggacttattgtgattgatcattgtgaggatccttatttagcttgtgatacacatatgaatgaaggtttcattagtggtaagctcgggctaagtggacagccagatattgctgaaacattacaggctattagaagtattttgttagcagaatacctcaatgttcctgtgcatatagcacatgtttca

SEQ ID NO: 6530 - DNA, 200 bp, Lawsonia intracellularis
gcaaagcggactgttgaagccataagttgggggaaatctcgaggggttaaagttacagctgaaacatgtccacattatttgttattagatgagagggctgtaatagggtataatacaaatgctaaggtcaatccaccgctgagaacacaagaagatattatggctttgagagaggctattaaaactggaataattgatat

SEQ ID NO: 6531 - DNA, 200 bp, Lawsonia intracellularis
gttagctacagatcatgctcctcatgctgcttatgaaaaagaagttccttttgataaagctccaaatggttttacaggctttgatgtagctatccctgttatgtactctcttgttagagaaggcgtcctttctgagtctgatttgataagattgtggtctaacaatcctgctggtgtatttaatctacctataaataact

SEQ ID NO: 6532 - DNA, 200 bp, Lawsonia intracellularis
ttaagccaggagatcctgctaacttttttttatttgatccagagttagaatggactgtttctaaagaaaatctttattctaaaagttggaatacaccatggttaggtgaaacactaaagggtagagtcgttatgcattggattaatggggtaaaagttgtttagttagaaaaaattttataactaattagtgataggtag

SEQ ID NO: 6533 - DNA, 200 bp, Lawsonia intracellularis
atatagtcaataatagttttatttatacatataactaattagaagtgaataaatctattgttattttattactgaacaattgtctccatgggtaaatattcttctatagggttaatcaatattcctacgttttcgatgcttgtttgaactatatccccatcactaataagtaatgaacctttaggtgttcctgttaagat

SEQ ID NO: 6534 - DNA, 200 bp, Lawsonia intracellularis
aaggtctccagggtttagtgtcataatgttggaaagaaaactaataagttccaatggtgggaatatcatatcagcagtagtgcttacctgccctagttcactattaatgctatttctaatttgaagattttctatattggggacatctgtttcaatccatggccctacagggcaaaatgtattatatgctttggcatgac

SEQ ID NO: 6535 - DNA, 200 bp, Lawsonia intracellularis
ttgtagtatattcttgctgttgaatgtcttttgctgttatatcattagcacatgtatatccaaaaatataattagatgctgcttcaggagtaactttatagcaagtttgtcctataactatacaaagttctgcctcagaaacaacgcggcctatatttgttggtaacaaaataggttgtccattaccaacaatactacta

SEQ ID NO: 6536 - DNA, 200 bp, Lawsonia intracellularis
ggtggcttgaaaaaaaacgtaggattagttggaattggttgttgtagctcttgagctttttcatgataattaatatcaatacaaataatttttgtgggagaaacaagaggtaacacttttatttttgatagtggaattggttcattaagtccaaggggactatgtaaacattgaatagtattttcagcgccaagagctgc

SEQ ID NO: 6537 - DNA, 200 bp, Lawsonia intracellularis
atagaatgagaactcattatattgaacacggataattcgcataaaacatctcctagattggagcaacagctcatatacttacttgttgatatgtcaaattatttttttataagtgtggtataaaaaccttttttgtcaactctaagtatagcgcttgttagtaggttgaagtagtaattatttttattttatagcttttt

SEQ ID NO: 6538 - DNA, 200 bp, Lawsonia intracellularis
tgattgattatcagtcgttatattatagtatagtaatatttttatatttacttcttattaaagaaaaataactatgttgttaatgataatatctgggaagtaagtattaaaagtaacaatgaggttagaatgttacagcgtaattttcatataattacatttggttgtcaaatgaatacaaatgattctttttggcttag

SEQ ID NO: 6539 - DNA, 200 bp, Lawsonia intracellularis
ttgtagtcttcagaaaaaaggatttcaagaagtttcattagaggatgcttctattataattattaatacatgctctgttagggaaaaaccagaacaaaaggtctatagtatacttggtaaaattcgacatgccacaaaaaataatcctgactcatttgtagttatagcaggttgtgtagcccaacagttgggggcaacat

SEQ ID NO: 6540 - DNA, 200 bp, Lawsonia intracellularis
tttttgaaaaatttccacaagtacgacttgttagtgggagtgatggcattgctatggctcctgatgctattgaacgtctttatgctgagccagatctaaaattaaatcttacagatttttcagaatactatcctgaaagagaatatgcattttcaaagttaactctttcaaataacaacacgctagcattaatggcttat

SEQ ID NO: 6541 - DNA, 200 bp, Lawsonia intracellularis
gtaaatattatgcaaggctgtgataattattgtacatattgtattgtaccctatactcgtggcaagcaaaagtcacgttcagtacaagctattgtagaagaatgtcaacagttaattgatagtggtgttaaagaaattgtgcttcttggacaaaatgtaaatgcttatggacttgataaggataagaattctcctgcaaa

SEQ ID NO: 6542 - DNA, 200 bp, Lawsonia intracellularis
tggagtaaactttgcaatgctagtccatactatagcaagtttacctgggcttgagagattacgtttttttagtgctcatcctaaagagttttcttctgaacttattgatctttttggagaattttcaactttatgtccaaggttacatctccctttgcaatcaggttcagataaaatacttagacgtatgggacgaaaat

SEQ ID NO: 6543 - DNA, 200 bp, Lawsonia intracellularis
attctatggacgaatacatatctattattacaaagttaaaaaaagtacgtcctgatatagcgttatctactgattttattgtaggtttccccggggagacagaggaagattttttacaaacattacagtcaataaatactattaaatttatgtctagtttttctttttgttattctgatagacctgggacacgttcttct

SEQ ID NO: 6544 - DNA, 200 bp, Lawsonia intracellularis
actttttctaataaagttgaccatgaggtaaaaattaagcgactagagcaacttcaagcaacccagctagaacattcaacaagttggctaaaaagtagagtaggggtagaaactacagtacttttagaaaaagttagtcgtaaaaaagcagaggataataatagttggcaaggtcgagatccatggggaaatgttgtaaa

SEQ ID NO: 6545 - DNA, 200 bp, Lawsonia intracellularis
tgttattttacctcaatctactaatataagtaatactcttcttcctgttcgtatcatagcatcaaaaaaacattcattggtagcagaacctttaattatttaatatggaaattagtctttaataagaccatatattattatgatatgttttttgcagttaggttataaagtaggaatagggtactaatatatttttatgt

SEQ ID NO: 6546 - DNA, 200 bp, Lawsonia intracellularis
aactattcagtataagtagtatagctaatgtatttccactaattatagataaaacttatgattgattttcatattgaagtttcttgtctaggaaaagggttattaccatcagaagcattagcttttgcttctttttctggatttaattcagtaggtcttgttattaaatctgatgctattagttataagtatgagctacc

SEQ ID NO: 6547 - DNA, 200 bp, Lawsonia intracellularis
attattaattaacacaatacaacagagtttattatatacagagttaaatgtatttcctggagtagtttttgctcatgtccctccagaattacttaaagacgttgtatgtagcgctcgagaactaggagcacagcttatattagcacaaggagagggtagttttttgggttattcattatcgactgcaataggaactaact

SEQ ID NO: 6548 - DNA, 200 bp, Lawsonia intracellularis
ttgcaataattaactctggaattgatatattgacatgtcctggattgatttcaagtgaagatgcagcatttgctacagagaaaggaatatctatagagttaacaggaggctatccctgtaatttgtttaatggacatatagtatctatgttttctttatttaattttaatctaacaatttcttgtggaattacaaaaaaa

SEQ ID NO: 6549 - DNA, 200 bp, Lawsonia intracellularis
agttgtttttcttctccagagattacaagaaactttttccaaggaattgcctttggtgctggacttgataaaaaaagttttgattatattcattgtgagtcaagaaaaactgttcaaaggttattattaagcactaaataggacataactattttttgtaaaaggagtttaaacgttggatatactacttccctttgaaa

SEQ ID NO: 6550 - DNA, 200 bp, Lawsonia intracellularis
aaagacgtgaacagttacataaggttatgtctgaaagaaaactggatggacttttagtatatcatgctgctaatagatactatttatcaggttttgaattacataatcctcaatgtaatgaaagtgcaggctgtttaattatattagctaatggtaaagactggttatgtacagactcaaggtacactgaggcagcaaaa

SEQ ID NO: 6551 - DNA, 200 bp, Lawsonia intracellularis
cgtctatgggatgaggatttcatatatagttatggacacaacattccagaacaacttggattacttataaataaaatattaccaaaaggtagctgtattggttttgagtcaaaagtactttcagtaaatttttttgaagcttttgttgaacaattacaagatattacacctgtaagtgctgatggtatagttgaagattt

SEQ ID NO: 6552 - DNA, 200 bp, Lawsonia intracellularis
aagagtaataaaagacgaacaagaagttcgattaatggaacaatcgtgtttattaaaccatcaacttttaacctgggttccatcaatattgcgtcctggagagagtgaagcttctgtttcttgggaaatagaattattttttagaaaacatggtgcaaatgaattagctttcccaagtattgttgcatctggaggtaatg

SEQ ID NO: 6553 - DNA, 200 bp, Lawsonia intracellularis
cagcattacctcatgctattccaagttcagatacacaaattgagagtgaagagttagtacttgtggatgttggtgctaggctatatgattattgttcggatcaaacacggacattttgggttggagataatccctctaaacgttttcagcaaacattagcattagtacaggaggcacagcatagagctattaaagctatt

SEQ ID NO: 6554 - DNA, 200 bp, Lawsonia intracellularis
cagcctggagtgttagcaaaagatgtgtataacacagtttatacattttttatagaatatggggtagaaaaagcttttaagcataatcttggacatggagttggtcttgaagtgcatgaagcaccctcattagggccacgtagtgaaacaatccttaaacctgggatggttattactgttgagccaggcttatattatcc

SEQ ID NO: 6555 - DNA, 200 bp, Lawsonia intracellularis
tgagtggggaggagtccgttgggagcatatggtgcttgttacagaagatggtgcaaaagtattttaaagtttgttttgagggaattataaatgcgtattgcgtttatcaacgctacaaagcgttggggtggtgtaaaaacatggatgttagaatttgctaaaattttttctaaaaaaggtcatcatgtttatatttatgg

SEQ ID NO: 6556 - DNA, 200 bp, Lawsonia intracellularis
tcgtcaagaagcgtttattacaagtgcacaaaaagaagttggccacggccaactagtttcatttggtttagatttaaatcctaaatctattttgtatttttggagagagtttcgattacatcaaattgatattgttattgttaatatagaaaaagatctgtccacagcaggcattgctgcaaagctttctggtattcctg

SEQ ID NO: 6557 - DNA, 200 bp, Lawsonia intracellularis
taatacaacggattggtttaccacatgatatcccttatcgtttaaaaacacgtcttatccatacatttattaacccttcatttttatgtccatgtgaatatattgcttctggatttaaaaaatcactttcttatatacctccacagcaggtaaaagttataatgaatggtagaaaggctacaagtgaatttttaaaagta

SEQ ID NO: 6558 - DNA, 200 bp, Lawsonia intracellularis
catagtcctcttaagtttatttgtacacaacagttagaacctaataagtgtcattctgttttattagaagcttttgcaagagttaaaggaagttttgaatttcatatatggggcacaggctctgaagagaaaacacttaagcagatggcttctgagctaggattaactggccaagtttttttccatggattttcagataa

SEQ ID NO: 6559 - DNA, 200 bp, Lawsonia intracellularis
tattattaataagctagaaaaaggagatatttttttgttagcttctgttagtgagggattgccaaatactcttattgaagccatgtctgttggattattacctattgtaagattggtaggtggcgtagatgaagttcttacaccagaacttcgtgattgggttttaccttatgaagcaagttcagaagattttcaaaagg

SEQ ID NO: 6560 - DNA, 200 bp, Lawsonia intracellularis
ttatttctatggctcttagtctttctgtagatgaattaacaggccttcgagagagtgcacgtgaagcatgtagacgtttttttgatatagatatacaagcaactaaacttgaagagtggttttatgaagttgtgaatagagaggtatagtcttttttgaaggtcatagttatttatcatgaaaatatttttctgtaattg

SEQ ID NO: 6561 - DNA, 200 bp, Lawsonia intracellularis
gcggggattagaatctaattcatctagacttcggtcagtactctttattttttttagtttgtcaattttattatttcctcttggacaagcattaagagttattctacctattctttgtttacctataattattttactttacatacaggattggaataactctacactccgtatattaccctttcgctggctatttatta

SEQ ID NO: 6562 - DNA, 200 bp, Lawsonia intracellularis
tttttatagcaagttttataatacaactagttacatctgagtggttagctgcaagttgggcttcagtaaaaccaaatttgttaagagggattgttttagcttttgtgggaatggaagttgtccgttcagagaaagatttgcgatggcttattattatttttgcggtaacatttttttatgaagggttagatggtgtatgg

SEQ ID NO: 6563 - DNA, 200 bp, Lawsonia intracellularis
caggtcttaacaggatttgactatataaagcatacagctattatgtcaggaaggttaacaggttctttagggacatatcgagtaggtaattatatggcaataatagctctacctgcctttgggatctggactcttcttcctatgaaaaataatagattacgtatagttgctgtagcagtattgttatctccaggtttatt

SEQ ID NO: 6564 - DNA, 200 bp, Lawsonia intracellularis
tctttggttaggttcatttacccgtataggatatttagcccttttaggggctttatatattttgtggatttgtatttggacaaaattctcattattaaaagttattgttcctccaatgttattgctagtagtattaagtatgtttggaattgcaagattaagctgggaaacaatgcttaatgatccacgaatagagttat

SEQ ID NO: 6565 - DNA, 200 bp, Lawsonia intracellularis
ggataagagctatagaggtaggaaaagagcatttatggcttggaactggtagtagtacttttatattagctctacagaaacagggtataattttacagtctgtcccctctatggatcttggtcatcctcataatatctatattcaattttttattgatgggggacttattggatttactagctatattttattttttgtt

SEQ ID NO: 6566 - DNA, 200 bp, Lawsonia intracellularis
attataactctttggacattgtttcatattcgaaggggtgtccaaaaagaaatacaaggtttattccctggatgttattggcagttactttcatttatttgggctggttgggttgcatatttaattacaggattttgtggacatgatttttatcgaacatggtggctatctactgctgccacattgttaggaattcttat

SEQ ID NO: 6567 - DNA, 200 bp, Lawsonia intracellularis
cggaggatgtcagtggggcaaaaaagatagtaaaaaagagttggatagtgtttccttagtttgatattgtgaattttattatgagcctttgtggatagaaggtttggtcacatggccagagcggatacaacgtgtacatatagtaatagtttttattcttccatcaggaaattgattacgcatatgttgaagattgggat

SEQ ID NO: 6568 - DNA, 200 bp, Lawsonia intracellularis
tgaaaactcttttagttttaatatttgagtggcttacataattaccaacaaggggttttttcccacatatttcacactgttttgccattaacttctccgtaactataaaggatatttttaagggctttcttataactttaacataaaaaaatagcaagtttattatggaatattttttaatagtaatagtaagttctctt

SEQ ID NO: 6569 - DNA, 200 bp, Lawsonia intracellularis
acctatagtaacatatcgctattgtttgtttattagttttttatgttgaactattattgagttgttatgaaaataaagctacttcaaaaaatttgtatcatattattccttattaactatagtctaatatcaggatgttcttcaactaaaatagtagtcccagaaggtaatagttctgatttgttagaaaaaacacagga

SEQ ID NO: 6570 - DNA, 200 bp, Lawsonia intracellularis
tataaaaagtatagaggatcaggataggaacatttctgctcaggcagaagaagcttggaagaataacaatatgcttgaggcgcaaagactttacaggattgttgtgacacagtctaacttaacagcttttgaacgtaactccgcatgggaaaggttaatcaagtcatcaattgctaataatcatttccatatagcactag

SEQ ID NO: 6571 - DNA, 200 bp, Lawsonia intracellularis
aatttttaactcaatggaagcttagtgatccaacagctaatatgcaaccagtttggcaagattcatggggaatagctgtactaaaatcttcacgtgtacaagcaatatctcatgcacaacaggtctgggaagatgcttctttacctattccattacggggaatagctggaggagtattgatgattttaagcccaaaagaa

SEQ ID NO: 6572 - DNA, 200 bp, Lawsonia intracellularis
aataaaacattgatagcaagtaaactatcagagctttataagcactcagatcatgcaaattgtatgatgctagaacaaagattatttacgttgcttagtaatagttctagtgaggaattgttagcacttgaatttcttacagggcctgagagagattttatgtatccttggtcaattattattcttgatgtattacgtcg

SEQ ID NO: 6573 - DNA, 200 bp, Lawsonia intracellularis
agagtggcctagtaaaactaatcgtactgcagagttgctggggaaaattaattacccaggcgtattttcagactcttcgttgcttgcttcagctattcatgtagctgagcctaaatcgttgttagttgatcatactaatatattattttcaccaggttgttatgcgttagtacttccaatgagtggaccatatagttcta

SEQ ID NO: 6574 - DNA, 200 bp, Lawsonia intracellularis
ttggttggaatattgctaaaggagctaatgctgcccaagaggaacttataagcgcaggggttgatgttgaagttgttattataaattctgaagcagtaggttggttagaaaaactagaacagttaccacagaagtgtattattgttggtggtccattacaggcagagatatatgcagccataagagaaaagaatatcctt

SEQ ID NO: 6575 - DNA, 200 bp, Lawsonia intracellularis
tcaaataagatattttttacatttttgccttcaattggagaaggtgatgaaggtataactgcttggcgttttttttcaagcccagaagatcaaattttagctcttcttcgttttagtcatgaacttgatattaccatgtgtggagtattatatcccgaagatggatatggtagaaaaatgacagaattatttgttaaatt

SEQ ID NO: 6576 - DNA, 200 bp, Lawsonia intracellularis
agctgagcaaagtggaatatctgttatgacaactggatacaatccacatgacacatctagttggtcaaaattattagcaaacgttacaaaaacaagaatgatagggaaagttcctgtaccatctactccttttcaagctgtttttcttccagatagctggaaaaatattgaagtattattgccatatctttttttccaag

SEQ ID NO: 6577 - DNA, 200 bp, Lawsonia intracellularis
gggaagataggcttgttttaatggggacaaacttgtgggagcaaggtctttctcatggagaaaaaaattttataaggaatatggatcttgctgtattcccaggaagttggaataagtctacacctaatgccacagctgccatgctaatagaacgatttacaatggataatcaagaggaacctgacttttgggttgggcta

SEQ ID NO: 6578 - DNA, 200 bp, Lawsonia intracellularis
gggtatgactttatacgtttttcttcagcattaaatatacatgaagttaattggcaagcatctcaggtaaataaaagcatagagaaagctcaacaaatggattggagcatagctcctatttattgggaaaatgggaaagctcaacagaagttatttcttttttatccaacatcttcagggggtaagttattaaatactaa

SEQ ID NO: 6579 - DNA, 200 bp, Lawsonia intracellularis
tttatttaaaaagcgtcttgatgcaattaaaaaacggcacttaaaacgtgtttcggctgctgaaagggaggtgtctaaataagattattgtttcttaaactatactaaggaatatctgtccatataggttgagtttcgtcaaggctttcatttcttaactgtctacataaaagtttttgtacggcttcatgaggagatat

SEQ ID NO: 6580 - DNA, 200 bp, Lawsonia intracellularis
aactccttcaagaacattatatacagcttttgttataggcatatcaacgttcagcttactggcaagagtattaacagcataagttgttttgataccttcagcaatcatattcattgagtttgttatattttttaaaagttctcctttcccaagacgtaatccaacttgcctatttctagacagctcccctgagcaagtta

SEQ ID NO: 6581 - DNA, 200 bp, Lawsonia intracellularis
gaaataaatctccaagccctgataatcctgaaaatgtaagtggtgaagctccaagagctttccccaggcgagttgtctctgcaagaccacgagtcattaaggctactctagtattaataccaaaacctagaccatcagagactcctgctgctattgcaattacgtttttagttgccccaccaagttctacacctgtaaca

SEQ ID NO: 6582 - DNA, 200 bp, Lawsonia intracellularis
tctgtacttgaatatgttctaaaccatggagtagagaaaatttctcgtagatgttcacccagttgttcattgcgacatgcaaggacgacagctgtaggtttttcacacataacttcttctgcaaaagaaggtcctgaaagtacagcatagtgagaaacacgatgagccatttcatctaatatcatttgttcaactgtttt

SEQ ID NO: 6583 - DNA, 200 bp, Lawsonia intracellularis
taatgtttctacttcaatcccttttgctgtattcacaagtatacaattttttgtcaaaagtggttcaagttcttgtaatacaggccgtaaagattgacaggggacagaaagaattacaattgttgcttttgctaacacatgagcgggttctttagtaagaaagctaattttccctgttacagcgtggattgcagggtgaa

SEQ ID NO: 6584 - DNA, 200 bp, Lawsonia intracellularis
tagagaatccaggaaggtatatattattctcatggtgcatattgatatagtcagctaacttttgactacgtaatactaaatgtactttatgtcctcctgtggctaatagatgagctacagctgtaccccagcttcctcctccaagaacgacaatagattgtgggttagacataaagatccccttggatatttactaacat

SEQ ID NO: 6585 - DNA, 200 bp, Lawsonia intracellularis
aaaataggtaaaagggttataaaatggataataagtagaatatataattatggacaaataaatagacttcatttttattaatagttatttttatagtataatatataaattttttgtttttttttttcaaggaaagtatatttaccttataacctaaagaacaattttttatttattatatatttagataagataacata

SEQ ID NO: 6586 - DNA, 200 bp, Lawsonia intracellularis
aaaaaataactaacaatttaaaattagttattttaaatatagtagtatattttttggatatcagtaatctgatggaagtcaataaactttatgaaaaaagaacgacaagaaactaaaaatgcataattttcattttgttagtgaatatatttgttctactatttgtatttctaataactttagaatcccttgacccttta

SEQ ID NO: 6587 - DNA, 200 bp, Lawsonia intracellularis
tgaggtgtgaggtacacacttgttataaggataagaccaataaaagatatatattatatacgtaagtagtagaaacaattttttattttttactatagaattttaccttttttttatttataatgagttttattttactaatcacagggagactcggaaagaatgaccgggaaaggttgtatcattgaactaaaaaacgt

SEQ ID NO: 6588 - DNA, 200 bp, Lawsonia intracellularis
cagcaaaatatttgaagatacctgtgcccttgataatattaatctacagattgcaaatggtgaatttttaactttacttggtccttctgggtgtggaaagactactatcttacgtattatttctgggtttgaaaccccagatgttggagaaatattaattgcaggggttaatgtaagtggcttccctccggaacgaagac

SEQ ID NO: 6589 - DNA, 200 bp, Lawsonia intracellularis
aagtgaatacagtctttcagcattatgcattatttcctcatatgactgttcgtgataatgtagcatttggtttgcgtatgcaaaaatgtcctcgtgaaaaagtgaatgagttggtttttgaagcattacgaatggtccatcttgaaaattttgctgatagacgcccttctcaactttctggaggacaacaacaacgagta

SEQ ID NO: 6590 - DNA, 200 bp, Lawsonia intracellularis
gctattgcaagagctgtagtaaataaaccattacttcttttactagatgaaccttttagtgctcttgatcataagttacgacagattatgcagcttgaaattaaacatttgcaacgtaaactgggcattacttttgtttttgtaacacatgatcaagaagaagcatttgctatgtcagatagggtagttgttatgaatca

SEQ ID NO: 6591 - DNA, 200 bp, Lawsonia intracellularis
aggtaggatagagcaaattggtactccacaatgtatttatgaagagccagttaatttgtttgtagctcggtttgtgggagagattaataatttggcgggaactattctttcttgtaatgatgagggaatatatgaagctgcaattgcaaatgaagtttttccattaagaacaccacatcgtttttctccaggagaagctg

SEQ ID NO: 6592 - DNA, 200 bp, Lawsonia intracellularis
tgaatgtattgttacgcccagaagatatacggatatacttattagatgaagaagttttgaaagtccctcaccttagaggtcgtattgaagaaacagtatataaaggcgcaacagtagatattattattgcattagacgttggtgggactttacgtgttgctgaattttttaatgaagatgatgcagaaattagctataat

SEQ ID NO: 6593 - DNA, 200 bp, Lawsonia intracellularis
gaaggagaaagagtagctgtaacttgggttgatggttgggaagtggtattgccacatgaaatggcttaaaggttttcaacttgttgtgatagcaccaactgtgatctggcttggtttatttgctttattacctaatgttggtcttttagttgttacttttttaacaagaggtgaccaagaatttgttattccagtattaa

SEQ ID NO: 6594 - DNA, 200 bp, Lawsonia intracellularis
ccttttctaattatgctagactgtttgaaccttcttttttaaaaattttatgggattctatttggttagctcttatgagcacacttttttgtttattggtaggatacccatttgcatatcgaaatgctcgttcaaaagcaaaaattaaaccatggttgcttcttctcattattatcccattttggactaactcattaatc

SEQ ID NO: 6595 - DNA, 200 bp, Lawsonia intracellularis
cgtacttatgcacttgttttgattcttaaagcaaatggactattaagtactgtacttatatggttaggtattattaatgaacctatatcatttatgtatagtgactttgctgtttttataggtattacttatacgtttttaccatttatggttcttcctttatatacgactattgaaaaacttgatccacgtttgttaga

SEQ ID NO: 6596 - DNA, 200 bp, Lawsonia intracellularis
tgcagcaaaagatttgggagcagggggatttcgtgctttttggcatataacgttacctcttaccttaccaggtattgtggctggatcaatgtttgtttttttaccttctttaggcgcattttatattcctgaaattttaggtggctcaaaagatatcttagtaggaacgtttattaaaaatcaattttttgtaaatcgtg

SEQ ID NO: 6597 - DNA, 200 bp, Lawsonia intracellularis
attggccactaggtgcagcctctagtactattctaacaattttgctatttattttacttatacttcaccatattacaacacagtctttctctataaaaaatagagctgaaaatgatccacgatttaggaggcctgtctaatgaaaagattaggtcttatatggttatggattgtttatatctttttatatttgccaataa

SEQ ID NO: 6598 - DNA, 200 bp, Lawsonia intracellularis
tagttgttattggctactcatttaatattgctaagtatacatctgactggaagggatttacattacaatggtatagccaacttatgaataatactccgttgatagatgcagggattaactctttaagtgtagcagcattgtcagctagtttttcgacttttttaggtgttcttacagcattagctataagaaggtatagg

SEQ ID NO: 6599 - DNA, 200 bp, Lawsonia intracellularis
tttcctggtcggaaaattttgtatggttctatttatgttcttacagtatcaccagatatcgttatgggtatatctttattaatcttttttatattttttcatatcccattaggttttcttagcctttttattgctcatactactttaagcttaccgtttgttgttcttactgttttaactagattaatggagtttgatga

SEQ ID NO: 6600 - DNA, 200 bp, Lawsonia intracellularis
acagcttgttgaggcagctcgagatcttggtgcaaatgagtctcaagcctttcgctatgtgatattacctcttataatgccagctattgttgcagggtggttattagcgtttactttatctatggatgatgtcttaattagtttttttgtcactggaccaacttttgaaattttacctttaaaaatttattctatggtac

SEQ ID NO: 6601 - DNA, 200 bp, Lawsonia intracellularis
gcctaggagtaaagccagaaatcaatgcactttcagctattatgttttgtattacagtcgtttttgtttttattgcatggctgttgcttcctaagactcgtcatacaggaaactaatattattataagggtattggctttattaatctagagtgggatagctattgtatgataatggagaaatacactatgaaaaaatac

SEQ ID NO: 6602 - DNA, 200 bp, Lawsonia intracellularis
gttagcttagctctaattttagtaatatcttgttgtcctctttttgctaatgataaggacacacttaatgtgtttacatggtctgaatatattccttcagatgtactggctgattttacaaaagaaactggtattaaagtggttgtgtctacatttgagtctaatgaagcaatgtatgcaaagctaaaattattaggtgg

SEQ ID NO: 6603 - DNA, 200 bp, Lawsonia intracellularis
taaagggtatgatattgttatgccttcaagttactttatagaaagattatataaagataacttattagcacgtcttgataaatcaaaaattatagggcttaataaccttgctcctgaatcccttggacattcatttgacccccataatgactattccatcccttatatgtggggtgctttaggtttattgtttaacaaaa

SEQ ID NO: 6604 - DNA, 200 bp, Lawsonia intracellularis
aagttgttgatcctacagttataactagcttcaatgatttaaatcgtcctgagtttaagggaagagttttgctatctgacgatatgcgggatacatttggtgtagcacttaaagtaagagggtattctgttaatacgacaaatcctgatgaaatcaaagcaggctatgaatggttacaacagttaaaaccagaaattcgt

SEQ ID NO: 6605 - DNA, 200 bp, Lawsonia intracellularis
gtgtttgatattacagcaacaaaacaggcatttattggagaagaggtattagctggtataagttggaatggtgatgcatttatagctatgaaagagaatcctaacttacagtttatttttccaaaggaagggtttattctttggattgataatttttcaattcttaatcaatctgaaaataaagaaaatgcatatgcatt

SEQ ID NO: 6606 - DNA, 200 bp, Lawsonia intracellularis
tattaattttttacttcgtccagaaatagccaagcgatgtgtagaagagtttttttatacaactcctaatatagctggtcgaaaacttcttgatcctatttatcaagaaaatcctattatctttccaaatgatggtgtaatgtcaaaaggagaattaattagtaatattggtaatgcaattaatatttatacttcatatt

SEQ ID NO: 6607 - DNA, 200 bp, Lawsonia intracellularis
gggaaaagttaaaaatgagccattgataatctatttattataaattctttaacctaaaaaagatgacttctctaagagaagtcatcttttttaggttaaagagtgtttgcagctagaagtaatagttatattattagtagatgttatcttttaactcaataggttaaataaatatatcactatttattattaattatgtt

SEQ ID NO: 6608 - DNA, 200 bp, Lawsonia intracellularis
tttatcttatatggcttcctaaaatatcatctttagataaagcttttggtatttttaatttatcatgtgcccactgagcggaaatatccataattggtgaaagttttggaagtgcatctgcataaatacctacttctacagctgcacgtgtatcaaatctaaatgatggtagtagagttgtatcttctactttgcagttt

SEQ ID NO: 6609 - DNA, 200 bp, Lawsonia intracellularis
agagcagccattggcataattaattgttttgagatagttgaagaaatttgtaatgcatctgtaaccattaagtctcttctgacttcattatgaactttcccaagggcatttgtacttgtttgtccatcagcctgagttgttaatgttcctccaaggatagctttactcattcctagttcacaacgtgtgacaagttgccc

SEQ ID NO: 6610 - DNA, 200 bp, Lawsonia intracellularis
aggaagatcatgggatgtatttgtaggggattggaaaatgatttccatgccagaaggtataatcccagcagcatctttcccaagtgtttgaagtgcccttagaagagctcttttgtctgaactactacttccaatatggtatttcccaattctaaatggtaatccatgtatttgaacatagttgatactggcttcaagag

SEQ ID NO: 6611 - DNA, 200 bp, Lawsonia intracellularis
cataagagcgtactaaatatgcccatgctactacgcgaaagagtccagctcttggtagccatccagatctagatcgatgagtacgaataacccagcccagtggccaaagaggatctccttcaggatctttatttcttaaccgtaagacatttttattttgtggtaacatttggaaccaggattgaggtcgatgatgaaat

SEQ ID NO: 6612 - DNA, 200 bp, Lawsonia intracellularis
gcttttgggatgtggatatgaccgtcatattcccattcaatttctattgcactgaaaccatgacctatagcatctgccatatctagtagtaaatcttctatggagtaaatactattaaactgttctcttatagcatctgctatttttatagcagtaggattatcttttcttgcaggaactatttcccaatctaatgttag

SEQ ID NO: 6613 - DNA, 200 bp, Lawsonia intracellularis
tatagctcgttttcttttggatatttcagcagcaaggtgttcacagcgatcttccatgtcagaaaagagttgatgctgttcagtgatatttccttcatctgcagcttgaaggatagatctaaggcggccaggggtcagaccaaaagaaatatttccccactgttctaaggttaataaagattgtgcagtgtctgatgttg

SEQ ID NO: 6614 - DNA, 200 bp, Lawsonia intracellularis
ttgtttgaagcatacctgatacagtttcaggtttattttttttatttttaatgaattggaataacttcatgtcactatctacctttattttaacaatttttaaaagctgctggaatagtataagatttttttaaaatacgccaaatatgtctatctgaaagcttatatcttcttgcaagatcagatactaattgcctttc

SEQ ID NO: 6615 - DNA, 200 bp, Lawsonia intracellularis
agaaatacctttggcagcaagtttatctctatcttgaattatttttgcatgttgttttgctgtaaggagttttttacagttaggtatgtatatacatgttccgccaaatgtttgaacaatattatgtacttcttgcttcccaattttttgtgcaagcaggtcaatttttgtccttcctactatagtatctcctctaggga

SEQ ID NO: 6616 - DNA, 200 bp, Lawsonia intracellularis
tgcgtaatgtgctaccgccataatgctgaataagtgaaaatgtaccatcttctccaataaggttgataagaaattgtactgcttctgggaaggcttttaaatctagttcagtatctgaaagtaattttttcatagttgtttctctcttctttaggagccaattatgacaaacggagattataatgaggacatttctagtg

SEQ ID NO: 6617 - DNA, 200 bp, Lawsonia intracellularis
aaatatttttaagttttccatcaggcatccgttcatatatacggatgtatgatttcgtttctactaagtggatactatcaactatagcttgcattgcttgttcccagcgaggatctttaatatttagtcttcgtagtgcaaggatagcattagtatttattttcccctccttatctattttaaatgcatgttctattact

SEQ ID NO: 6618 - DNA, 200 bp, Lawsonia intracellularis
gcacgtaattctccagggctagattggctccatatcctaatacactcatcaataattgctttagctacttgtagtccttcatcaaatgagatgcgttccaccatttgtttttttatttggtaattaccatcaaatgacataagtgtgatatttccttttactccacccatatctactttgtattgtttggctgtttgttg

SEQ ID NO: 6619 - DNA, 200 bp, Lawsonia intracellularis
aataaaggtattaagatctgttgtaagttctttttttaattctttgagttgtttctgtattttttttactttgttaacacattgcataacaaaattatttctttcaatatcaataggcttaatgtgttctttaagtatgaaatgcccttgagtatttttcatgtatctatcttttggtaatgacattgtttttactgttg

SEQ ID NO: 6620 - DNA, 200 bp, Lawsonia intracellularis
atttgtccagtagctgtggcataatatcctctttttagtgcatatggtaaaacgttgaagaataattttcacattgaccaccaaataaatatttgttaattttattgtgttgatagttcattgttgtgtacgaaatattgtaattacacaatttagtgtaatagtcaaacatttttttgtaactattgcatatatattac

SEQ ID NO: 6621 - DNA, 200 bp, Lawsonia intracellularis
aaaaaataaaaatttttattaaaaatttttactataaagagtgcgtaggtaccatgcatggatatacaaaaaataggtgaaaaactaaaagcactacgtggtcaagaaagtagagactctttttctgcacattttggtatacatagaaatacactagctgcttgggaatctggtgaacgtttaccgtctcttgaatttct

SEQ ID NO: 6622 - DNA, 200 bp, Lawsonia intracellularis
ttctttacttgcacagcaaaaaaaactttctgtagcagaaattttaggagaggctggagtagtgagtacaaaagggctatcttcacctcaaaaagtacaacaagaggcagatactacagttaatagtgaatataaattagagagggagagggcatgttctcagttttcatggaaagggaatgattttacattgattcctc

SEQ ID NO: 6623 - DNA, 200 bp, Lawsonia intracellularis
ttgtaaaagcagttctttcagctggtggtggatcttttgaaactacagataaaatagaaggacattatgcctttagaaatgattttttatattatcgaggaaatccaaaaacaatgaagcttttccgggtagatggtgacagtatggaacctagggttagtgatggtgatatagctcttattgatcaaggccaagttgct

SEQ ID NO: 6624 - DNA, 200 bp, Lawsonia intracellularis
cctagggctgggaaaatatatgcagtaagacttgaagatgtaatttatcttaaagtccttaatacacagccaggaaagctgatactttcaagctataatactgactatacacctattgagtttgatacacgaggtgatatggcggattgtttttccattatagggagggctgtttggattggacgagaacttgattaata

SEQ ID NO: 6625 - DNA, 200 bp, Lawsonia intracellularis
cctatatagtaaaaggttagatataaaaagggggaggaggattaactcccttttttaatagtaataagtatagaaagaaatatatatatatataatagtaacaactataagttaataatgtgataagccttattacactgtatgtttttaatactaaatcatttatttaaatgttatagaaatattattaatagtaatat

SEQ ID NO: 6626 - DNA, 200 bp, Lawsonia intracellularis
agtgtattaagcaaagtataataacattctaccttgtactctttagtataactagctttaaactatttactaattaaaaagaagtaggtttgatagtatggcactactttctgagctaatccagcgtttacctttagtaaaaaatactcatatgagttcacagggcttttctctatggatatgctgggatggtgaattag

SEQ ID NO: 6627 - DNA, 200 bp, Lawsonia intracellularis
ataatgctgttccacaagcactgcaagattatggcggaatgagtgttgttatagacaggtcacaagctctttggttttttttctcttcagacgtatttctagcccttgcaaaacttactgtatggtctaaatttcatcctttgcctataagtgtccaggttttccctagtaaacttcttctaagtgttcgacgtgagata

SEQ ID NO: 6628 - DNA, 200 bp, Lawsonia intracellularis
tcactctccattgatccttcattagctactcaagaagtgttagttcctcaatcactagaaatttgggtacatcctaaagcaaaagagattgcaggcattattcctggaataacttatacactaagtaaagagttgcaggggatggcgtctgttaagtgggaaaatcttgaagcagacccacggttaccttatatgtcttc

SEQ ID NO: 6629 - DNA, 200 bp, Lawsonia intracellularis
tcagggctggtatgtccttattcatcctgttgggaatcctttagataagctttttcagtcaggttggaaaacaatgtatgaggcaatagaaaaaattattcaggctaataaatttaagtataatctccataataactatcttatgttgtctattgataatttaagacaacttagaatttgggttcgagacatcctaaagt

SEQ ID NO: 6630 - DNA, 200 bp, Lawsonia intracellularis
gtatatcagatgctaaagtgcaaggaacttattggccttgtgtctgtatctctattgataaaaagggattaaattttacaaatgatcttccaacaaaagtgggtattaagtgggataaccttattcctgacgtcccatatattacatatcgcaatgcatttttattaggagaagggttcaaaattacggatttaaatttt

SEQ ID NO: 6631 - DNA, 200 bp, Lawsonia intracellularis
tctagttcacatgtttcaatggatagttggtgtgcagttgaacttaccgaagatagttcttttgttagtgaagttattccaattcttatgcctgaaaaacttgtttcaggtgagaatacagggtgtttttactgtggttctaaaaatcatgataattctcaatgtgttacaagaggtatgtcactttctacacaaaatat

SEQ ID NO: 6632 - DNA, 200 bp, Lawsonia intracellularis
ttggaatgatttagcagaaatgagcgtagaggtgatgagtgaaggatttcaacttattgaacaggaactgaatggagatgatgttattgttggatatgaaaatatcctttttaaggataatacattagaacaaaggttattaaaagcaatttttgaaactaacttacctttacaagtaagaagtattaggaacatttggt

SEQ ID NO: 6633 - DNA, 200 bp, Lawsonia intracellularis
tagctacaggaagagagttcccaaaaagtggagatgtattttctagtaaaaataatgtaaaagatgatagtcttgcttgggggttacttgaacgattcaaaaagatacaagcttcagagctgctatcctttgaaaaagatgtgttatctgctagtaggaatgctccaagggactttcgacttcgtacactacttggattt

SEQ ID NO: 6634 - DNA, 200 bp, Lawsonia intracellularis
attgcagttgaaaaaggtgatctatcccgagcacaacttttatggaaagaggcagaatcccttgcaagcacagggctacatcaagtatggcatatgtttttgcaagcaagacttcttgaaatacaaggacgtttttcagaagctatagagatatatcagaatgtacttcgtctatatccttcttggttagatgcagaata

SEQ ID NO: 6635 - DNA, 200 bp, Lawsonia intracellularis
tcgtcaaattgtctgtcatgtaaaaatgggttttgctgaacaagtacagactaaaatttttcaacttattgagcaagactcctcattttttaatagattttttattgatccagaacttgacagagggtatttaagtatccttagtgaacttcttgtagctttagaagagaaaagaagattagctagtgatgaaaaaataa

SEQ ID NO: 6636 - DNA, 200 bp, Lawsonia intracellularis
aagcagaaaagctacttatagagttagatgaatggtttccaaaggaccatgctattgctaatacatttcgtcaaaaacttaaactagttattaataacttatctttgaatacgtatgttgcatttctttctataattcagatgcgtcctattatagaaaatgatattacaaaacaaattaaatatgaaattaaaaacctt

SEQ ID NO: 6637 - DNA, 200 bp, Lawsonia intracellularis
aaacaaatttttaaaatttatttgaagcagttagaaaaaatacgtgatgaagcagcatggttccctttccctaatatccttattgagtttaataaaaatttcaatgaatgtgcaaatatttttaattgggcatttacttcaaattttaatgatgcagaagtttttaagaaagcaagggggtatgcaccacttcttcaaga

SEQ ID NO: 6638 - DNA, 200 bp, Lawsonia intracellularis
atatttagaaggattaacacaaaggttaaaatttttacggatagtacgtgacgtaacattgtttattcttatcttaggaaagacatttttttggatagaggttataggattattgctttgtgcaactagtgtccctttgattgctgtttttggaagtaaagttggacttggttggttaagtacattgataaaagaagagc

SEQ ID NO: 6639 - DNA, 200 bp, Lawsonia intracellularis
aatggggattacagcgagttttattacttattattagcagtgtggcaataggtatttctgcaatacatacaacattagtttttgaacgtaagagggatcaattgattgcagaggcacgtggacagcgtgagaaaatacaacacataaggcttaaacatattaatgaagctaaaaaagaaaaacaaaaatctattgaaaaa

SEQ ID NO: 6640 - DNA, 200 bp, Lawsonia intracellularis
atatagtatttttttttactacacttgtagtattattcttaagccctattcgttagtacgttgaatagatgctccaacagcattaagttttttttcaataaattcataacctcgatctaaatgataagttctttgtattgttgtgattccttttgcagcaagacctgcaagaactaaagatgcacttgcacgtaaatctg

SEQ ID NO: 6641 - DNA, 200 bp, Lawsonia intracellularis
aggccataacaggtgctccttttaactctttaacacctgtaacaatagctgtgtgtccgtttaggcggatattagctcccattcgagcaagttcttgtacatgcatgaacctattttcaaagatagtttcattaactgtactagttccataagcaatagacataagggccataatttgtgcttgcatgtcagttgggaat

SEQ ID NO: 6642 - DNA, 200 bp, Lawsonia intracellularis
cctggaaatggccttgttgttacatcagtagctttgagtgtttttataggggcaacatagataccacattctcttttttcaatgtgtatacccatttgcataaatttattaataatagcttccaattctttatagggacaacctgatataagcagttctccctttgtaatagcagcagcagtaagaaaagtcccagcttc

SEQ ID NO: 6643 - DNA, 200 bp, Lawsonia intracellularis
aatacgatctggcatgatactatatgtacaaccattaagagaagggactccttggatatgaatgacatttgtaccgtgtcctttaattattgcaccacaggcaataagaaatcgtgcaagatcttcaatttcaggttcttgagcagcattttcaagaatagtttctccttcagcaattgaggctgctataagaagatttt

SEQ ID NO: 6644 - DNA, 200 bp, Lawsonia intracellularis
ctgtcccaccaaccgttgggaaatccaagtaaatatgtgtacctttaagtttagtacagtcccctataaggtatccatcttttagggtaaacttagcacccattttttcaagtgctttgatgtgaagatctataggacgagcaccaatagcacatcctcctggcatagctaccttagctttaccaagcttggcgagtagt

SEQ ID NO: 6645 - DNA, 200 bp, Lawsonia intracellularis
ggtcccagaacaagaattgatgctctcattgtacagacaagttcataaggcgcctcatgttgtaatgttcctggtgttagttctatacattgctctgtttgctgaatagtgcatccaaggatttctagaagttttattgttgtcctaatatctcgtaactgcggaacattatgtaacgtaacttttttatttgctaaaat

SEQ ID NO: 6646 - DNA, 200 bp, Lawsonia intracellularis
acttgctattagaataggtagtgcagcattttttgaaccacttacagttactgtgcctttaagtgggtaaccaccttcaataataagtttatccatgtattttttgccccatgatttgtcctaatagcatattagatccttctatctttttattttattagttatataaagttattccatccattgttgatggatatttt

SEQ ID NO: 6647 - DNA, 200 bp, Lawsonia intracellularis
ttatctgatttttttgtttaaagaaatgggaatcaaagagacttggcttgaccttattatttgtttaagatacacaccatcgtgcatatggcggatgtagctcagtaggtagagcacctggttgtggcccaggtggccgtgggttcaagtcccatcattcgccccattcttattaatgttatatttccaacgttagtcct

SEQ ID NO: 6648 - DNA, 200 bp, Lawsonia intracellularis
acagggcaatgatcagagccttgaatatccatttcaatccaagcatcacgaattgtaggcataagttctatagaaacaaaaaaatagtctattcgccatccaacattacgctctcgagcacgctgttgatatgaccaccatgaataattgtttggtatatccccatgaacatagcgaaatgtatcaatataacctgcagc

SEQ ID NO: 6649 - DNA, 200 bp, Lawsonia intracellularis
aataaaacgatccatccaggttctttctattggcaaaaacccagaggtttcctcatttgcttttgggcgagcaaggtctataggtctatgggcagtattaaagtctccacatacgacaataggttttgtctttctagcttcttctgcataattaagaaaactatcataatagccaagcttatagcttagacggtggtctc

SEQ ID NO: 6650 - DNA, 200 bp, Lawsonia intracellularis
cttgagttccgttaggaaaataaatattcataaagtgaaaagatggatattctaaatggagtaaacggccttcaccttgaaaggtaggattaggtagttcagctgtaacagcaagtggtttaggcttactaaatacagccactcctgaatatccttttttctttatagaggctgaccagtaagatagccaaccttctggc

SEQ ID NO: 6651 - DNA, 200 bp, Lawsonia intracellularis
ttttggaggttatcttggagttgtgaaggatctacctttgtttcttgtaaagcaataatatcggattgattctcatgaaaccaattccaatgtggtttttttatgattgccctgaatccattgatattccatgatgtaagtcgtaacaaggaaggcatagtagtcatccatttaatagtctattgctatggtaagtcagc

SEQ ID NO: 6652 - DNA, 200 bp, Lawsonia intracellularis
atcataagtatattgcttctataaaaaaatttagtagaagaatatagattatctaaaaaacaatattacatgttaaagttatagcttttttaatattaattaatcttattaatagagaagcctaaaagtataagaattatctctttgctgtaagaatcatatagtttagtgggatagtagtaaatatcttttcttttttt

SEQ ID NO: 6653 - DNA, 200 bp, Lawsonia intracellularis
aaagtactaactgcatccttttgtttcaaaatttgttaaaaatttttgttatcttttaatatgttttgttaatcgttttaaattaatgatggctttatagatgtgataggctcaagaatagatggttttctagtgagagttgtaggttcttttttagttgagtttatagatgcttgattagaatactctttaggtgtttc

SEQ ID NO: 6654 - DNA, 200 bp, Lawsonia intracellularis
tggttgtccgttaagtttaagctgagcttctttttgtatactaatatctttagataattcttgtttttttattgaatttgaaggcttaattctagcttcctttatagcagcttcttttttattagagatttttttatctttagatataaatggattagagttttttgggctataggaggaaaaagtttgcttgtgtgata

SEQ ID NO: 6655 - DNA, 200 bp, Lawsonia intracellularis
cataggacttccatagtttatcagatagaagagtcctactttcttcgtgctgttctagtccagtataggttgaagtactccccaaaaatgagagactcatttctccaaaggcatacggtgtatatatcaaaagggagaggcttagaatagataaaaataggcgagtcatgttgagatcctccaactaatttatgtttgtt

SEQ ID NO: 6656 - DNA, 200 bp, Lawsonia intracellularis
acagactagtatcggttgaaagtagagaatgtttagggacagtttttatataaaatcaccattgatgatgaaatgaagatatttatctgatcttataatatcgaaaaaattatccttgattaacaaggagttactaggagcctattaattataggtatagctcaatgagtactttgtcagttcattgatgaattttctgt

SEQ ID NO: 6657 - DNA, 200 bp, Lawsonia intracellularis
tggtgcagaaatattaagaaataggtgtagtcccattagccatacctatttatatgggacttacgacaatagagatgttagtagttataggtggaggtggtttattatacaacatctaaaaagttaactataacttcactccttcaggtatctattcttatagttattatgtttttttttttgcagaacatattcggaaa

SEQ ID NO: 6658 - DNA, 200 bp, Lawsonia intracellularis
cttttggaagaaacagaaattgctgcacacaaagttttttcaggggtaaagaattttttaagaattaataactaagtccaataggatcctagtagtcaaaaataaggatcttattggacttaaaatgcttaaattacaatttgaagttagaatgttaaacgtgcacttaatataatttgatgcataaatatttcttttgt

SEQ ID NO: 6659 - DNA, 200 bp, Lawsonia intracellularis
ttttaaactagcattagcagttgcagtaacaggtcctaatggtaggaggtcaactatttgacttttattccagcttttagtttcacctttaccaaatccagcaaaacgatatcctaaatcaagagcaaaagtttctgaaatttcatatgaagtacctactgtagccatccaggcaaagttcttttttgttttatcatcaa

SEQ ID NO: 6660 - DNA, 200 bp, Lawsonia intracellularis
gttttactttgatatcgtagcctaagctatctatgatagcattagactttgtttttacaccagcaatgccaagtccaacacctatatatggtgtaaatggagaatcagtttttatatcaaaatatccgtttactagaagagctccaagggtaatatccgtcttttgcccattgtgttttatatccatttttttaaaaaaa

SEQ ID NO: 6661 - DNA, 200 bp, Lawsonia intracellularis
ctaaattcaagctctgtacgtataggagtttgaaacatatgattaaaatcatatccaacagctaatgctcccccaggaagtgattctgtttttttatggctaacagagtctgagatagtttgtacgtttactataccaattgttcctgttgttttgatatcaacaggtgcaaatccccaaatgaacttaggagcaatata

SEQ ID NO: 6662 - DNA, 200 bp, Lawsonia intracellularis
taatcctgtttgttcagctgaagcaattgtaggtgatatagataataaacatgctgaaagtaaaatccataattttctcattgaataatttctcctttatgttagggcttaaattttttaatatactaaactataaaaaaagtaaataggataatttgtgaacttattttatttgttacaataggataaattaccttaat

SEQ ID NO: 6663 - DNA, 200 bp, Lawsonia intracellularis
aaggtaaaagaattatattgacataacattgttacaatgtgtagaagcatcattaattggggctgtagctcaattgggagagcgcttgaatggcattcaagaggtagtcggttcaatcccgaccagctccaccatattttttataatatataatagcttaatagtttaggtagctttattatattagatttctcttcttt

SEQ ID NO: 6664 - DNA, 200 bp, Lawsonia intracellularis
tttaagatactttttattgtataatttacagtagtatcattgtaatttttattttagttagatagtaatagtaagaatcatcttacattactatctaactgtaattagttctgtcatcttaacttcttatctactagctaaaaattaatcagtctaaaagacattattataataatattacctagtaatagttattataa

SEQ ID NO: 6665 - DNA, 200 bp, Lawsonia intracellularis
tattcattaccagtggatataaagtttaatttagaagggtattatggctaacaagtataaactcaaaacgaataatatgcttaagtgtgctgcatgtggaaacaatgagtttgaagaacatcataaagagaaagaaggaaaagaaaagtggatctatgtttgctcaaagtgtggattgatgatgaaatttattaatcagt

SEQ ID NO: 6666 - DNA, 200 bp, Lawsonia intracellularis
tgaacgttgaaagttaatagccaggaaggaggggagtgagctcccctttatttatgcctgtaatattgtaccagagtatattaatttggaattaaactaaggatgagctatgtaacttcatttaactttgagtattggaggtcctatgggtaataacaataatgataatggaatatcagttaattctctaccatttagag

SEQ ID NO: 6667 - DNA, 200 bp, Lawsonia intracellularis
atgggaagtcagcagaaccacactattctaatactatcccccaaagtaaatataaaatttctcaaagaccaacaccacctggagttgagcctatgacttcaggttcatttaaaactccagataatactacagaaaagattaaggctatggactcagttcgtgtcaatggtcatgatatggctattacaactaatcttggc

SEQ ID NO: 6668 - DNA, 200 bp, Lawsonia intracellularis
gtaaaaatagctaataatcaaaatacacttagggcaggagtacgtggtccatcgttactagaagattttcatcttcatgagaagttagcacacttccatcgtgaaagaattcctgagcgagttgtacatgcaagggggtcaggagcttatggatattttcaagtatataaatcaatgaggcaatatacaaaagctgcttt

SEQ ID NO: 6669 - DNA, 200 bp, Lawsonia intracellularis
tcttcaggatccaggagtcaaaacgccagtttttgttcgtttttctactgtacaaggttttaggggttctcctgatactgcaagagatttacgaggctgggcaacaaagttttatactcaagaaggtaactttgacttagtaggtaataatacagctgtattttttatacaagatgctatcaaattcccagattttgtgc

SEQ ID NO: 6670 - DNA, 200 bp, Lawsonia intracellularis
atgctgtaaaacctgaaccacataatgaggttcctcaaggacagtctgcacatgataatttttgggattatgtatcattacaacctgaaacattgcataatgttatgtgggctatgtctgatcgtggtattccaaggagctatcgcatgatggaagggtttggcatacatacatttagacttattaatgagcaggataaa

SEQ ID NO: 6671 - DNA, 200 bp, Lawsonia intracellularis
agttgttttgttcgttttcattggaagccagtgtatggtactagttctcttctttgggatgaagcacaaattcttacaggacgtgatcctgattttcatcgtaaggatctttggcaagcaattgaagctggggattatcctgagtatgagttaggactacaaattattccagaagaagatgagcataaatttgactttga

SEQ ID NO: 6672 - DNA, 200 bp, Lawsonia intracellularis
tattttagacgctacaaagttaatcccagaagcattagtccctatagaacttgtagggaaaatggtattaaaccgtaatccagataatttttttgcagagactgaacaagctgcattctgtcctgctaatattgtacctgggattgatttttcagatgatccactcttacaaggccgtattttttcttattttgatactc

SEQ ID NO: 6673 - DNA, 200 bp, Lawsonia intracellularis
aattgcatagattaggtgggccaaattttaatgaaatacctataaataggcctatttgtcctgttactaatcaacagcgtgatggaaatcatcgtatgcaaattgattctactgttgctaattatgagccaaatactgtaagtggaaattggcctcgtgaagtacaaccatcagagcatggtggagggtttactacatat

SEQ ID NO: 6674 - DNA, 200 bp, Lawsonia intracellularis
aaaagtaaagttgaagggactaaagtacgtgagcgtagtccatctttttttgactattactcacaaccacgcttattttggttaagtcaaacagccccagaacaaaagcatataattgatgcatttagttttgagcttagcaaggtaatgcgaccatatatacgggagcgtatagtagatttacttagttatatagatcg

SEQ ID NO: 6675 - DNA, 200 bp, Lawsonia intracellularis
tgatcttgctaaaggtgttgctactaatcttggtttaactttaagtcaagaacaattgtcatacgatcttcctaagccagtaaatggattaactagtgatccatcgcttagtttatacgctaaaaataaacaaaatataaaatcaagacgagtagcactacttgttgcagatggtgtaagtaaggagtcaatagaaacta

SEQ ID NO: 6676 - DNA, 200 bp, Lawsonia intracellularis
ttagcaatatgttacataaagaaggagtatatccacagttttttgcgccacatatgggaagtattaagacggaagagggtaatgaaataacagttgatggtactattgaagggaatccttcagttgttgtagatgctgttattgttcctcaagggaaacaaagtctaaatacattattaaatgatggcaatgcaaaatat

SEQ ID NO: 6677 - DNA, 200 bp, Lawsonia intracellularis
tatttatgtcaagcatataaacaccttaagcctatagggcttcctggaaatacaaaagaaatgcttagctatatagggttatcagaaaatgatattgatgaaggattagtattggctcctgatagtccaaaaatgataggaaaatttatagatgctatgaaacaacataggatatggtctagagaatctaagataacaag

SEQ ID NO: 6678 - DNA, 200 bp, Lawsonia intracellularis
cttctctgcatgagtatgtaattatttataagtaactgctaaagagctctctttttataagggagttcttgtatatttttttatttttatactaacctagtgtttaacttcattatttaattttgttatataaattttaatatatatatattatctataagacgaaaataaattagatagttatacctaaatatactata

SEQ ID NO: 6679 - DNA, 200 bp, Lawsonia intracellularis
ttaaattttgttaattactagttatttaataagttttacctattaaataaactatacaaaattagtaaaaatttttactaatgattaaatattatagtttattatattacttatgttatttaaagaatatattaattagtatgtataaaataagatttctatttctaacaatattagaattaatatattttattataaat

SEQ ID NO: 6680 - DNA, 200 bp, Lawsonia intracellularis
tactaaaaacaaaagggaaaaatatttttaataatagaataatagataaatacttttatatttagatgaactaagttgatatattgaaatttatcatagtattgatacattttaaattatgttaatttagtacataaaataatttttaaaatgttacaaaaagttttatttttacaattattatatcagtaaattgtaag

SEQ ID NO: 6681 - DNA, 200 bp, Lawsonia intracellularis
tctcataatatttgaactataaaaatattgtgagacttcttaatatgttagaagaaacataagctttttatattaatttaataacatattttattatatgcttaactagacatattcaaccatgtagctatattcaaatactataataaattttaataatttttacttattatatatacattatataaaataattttgta

SEQ ID NO: 6682 - DNA, 200 bp, Lawsonia intracellularis
tggttaattttattaaaattaatataattatatatgcttaaaattatagtaaattcttatttataatatcaaatataacctattactatttttagaataaagattaacttagttacagtgaagtgtaatgtttatatatagatacaatatatttttccaccatattaaaaaaagttatattatataactaaatttgatta

SEQ ID NO: 6683 - DNA, 200 bp, Lawsonia intracellularis
ttattgatgatgcatggccttcaagcaattgtgattttactttgtgtagaattaatatggaggattccaatatgcgctggaaagatatttctatttttaaaaagttattaataggcttttctatagttattcttgcaggggttattgggcttgcaaatgattattttgaagtgactaggattcgaaatattacagatcaa

SEQ ID NO: 6684 - DNA, 200 bp, Lawsonia intracellularis
gtcttattagctgttaattatagaaaagctattttgaatgctgaagttgcacaccttacatgggtaaataaagttgctaactatcttattgaaagggggaaaaatgaattacatgttgagttaaatgatcatctatgtacatttggtaagttactttatggggagcaacggaaagaaatagaagaacgtataccagaaac

SEQ ID NO: 6685 - DNA, 200 bp, Lawsonia intracellularis
taagtctttatttctttttatagagggaccacacaaccgtcttcatcaatctgttattggcatcacagctgctatgggagaaggtaaaataaatgaagcatcacaaatttttcagaatgttactttaaaagaacttgatcttattcgaacaactcttaataagcttgttgtcgtttttgatgctaggtctacagttcttg

SEQ ID NO: 6686 - DNA, 200 bp, Lawsonia intracellularis
aagattcacttataaatacaatccattttgcattagtcgttatattattatgtgtagctgtgatgctaattggtggtttacttttatctttattccttggaagaagtattgttagaccaatatggaagctagtagcttatgctcatgaagtaagtgaaggaaatttaaaagatccaacattaaatcaaaaagatgaagtt

SEQ ID NO: 6687 - DNA, 200 bp, Lawsonia intracellularis
ggtcagcttgcaggaacattaggaataatggttaataaacttaagaaaactattgaagaagcaaatatgaaggcagatgaggcctatagaaaggaagaagaagcaaatgcagcacgtgtaaatacagagtctgctatccaggaagtaaaaaagaaacagcaagagctacaagatgttacagttcaattaaaaggtgttgt

SEQ ID NO: 6688 - DNA, 200 bp, Lawsonia intracellularis
agatgttcttagtagtgcatcaaaagaaatgtctacacaaattgaaacatctgaaaggggagcaattttacaagcaaaacgtattaatgaaactgcaacagctatgtcagaaatgagttcatctgttttagaagttgctcgaaatgcaaatgtagcagcagaactttctgcagaagcacgtactcgagctgaagaaggat

SEQ ID NO: 6689 - DNA, 200 bp, Lawsonia intracellularis
ctggcattatgaataatgcagtagaaagtatttatgaagtccaaaagcattctttgatgcttaaagaagatatgcagattttaacacaacatgcacagaatattgatcaaattatgagtgttatttcagacattgctgatcagacaaatttattggcacttaatgctgcaatagaggcggctagagcaggagaagctggg

SEQ ID NO: 6690 - DNA, 200 bp, Lawsonia intracellularis
cgaggatttgctgttgtagctgatgaagttcgtaagttagctgaaaaaacaattacttctactgcagatgtaggtaaagctattggtgctattcagcatagtgttgagaaaaacatgggacaggttgataaaaccgttcagtctattgagtcaactacagatttatcaactaaggcaggagagttattgagaaatattca

SEQ ID NO: 6691 - DNA, 200 bp, Lawsonia intracellularis
agagatggtagaatccacagcaagtcaggtacgttcaattgctacagcttctgaaaaacagtctgctacaagtgaagagattagttcttctattgaagaagtaaatcaagttgcaaaagaaactgcttctgcaatggtttctttaaataaagctatggtagatcttgctgctcaaagtcggggattacaagaactcatta

SEQ ID NO: 6692 - DNA, 200 bp, Lawsonia intracellularis
gaaagttggaacaagagacaataggataatgatatacaaaagtttatcctagtattagatagagatgtttttacttctttatctaagactagggacttttatttttagtaactaatagaacttaataattaattattctagataattacttttcactccaaaaaactctaccattttttactttaagccttccaagtgga

SEQ ID NO: 6693 - DNA, 200 bp, Lawsonia intracellularis
agttctttccaaaatagtgggacttctttacctttaaaatctgtcattatgctttgtccttgtgtaattttttcaagttgttgaacgttatcaatatgtaaacaataagctaggtctgttgttgattgtaatagacgtagccgtggtgaaggtaagatatttgtctttgatgttttaccaataatagggccttgccaata

SEQ ID NO: 6694 - DNA, 200 bp, Lawsonia intracellularis
tagagtatagggtaaataagttaaggcagcatgaggaataaaatggagattagagttgaagtcaacaagatttccttgtggtaatttagttatatcaatgccaaaaggtccaagggtatctaatgaatagtgaggatatgaagatatatctattttttcattagtagtatcaattttggttgtatttttaccaggctttt

SEQ ID NO: 6695 - DNA, 200 bp, Lawsonia intracellularis
gaagacaagcaataaaaaatccttgagagtcatgggtattaggtaaacggattaccccttcataagagggtgatataggttttataacagagaatcctaaagggagttcaagcgggattaattttaatccaaggttagttatagcaaattgtatttgtgcttcattttcatctatattagttgtacatgtggagtaaaca

SEQ ID NO: 6696 - DNA, 200 bp, Lawsonia intracellularis
attttccccccggggattaatagacgtgttgcctctgtaagaagttttttttgtaaaataataagtggattaattcgttctccctgccaaatttttgtaacttgaggatttttttttatagttccccatccagaacatggaggatcaagcaaaattttcccccaggtagcatctggcataggtagtttttcagctggcca

SEQ ID NO: 6697 - DNA, 200 bp, Lawsonia intracellularis
tgaacatgtaactgtattaaaacaattaagtctaccaagattattacgtaatgttagtagacgacttttggtaggatcatttcctacaataagtccagtgttacctacaagttgtgatagtaaagttgttttactaccagggcttgcacacatatctaatataatatctccaacattagcttgtaaagctaatactggca

SEQ ID NO: 6698 - DNA, 200 bp, Lawsonia intracellularis
acatagacgatcgatcttgaatataaattaaaccaaaaaatgcagctaaactttttccaagggggaatggctcatatataatttttcttgctaaatataagaaaggatcaggttcaaagataaatccttgttcagaaagtaagttttctactaaagaaatttcattaggataacatataatcctaaaggatcgatggcta

SEQ ID NO: 6699 - DNA, 200 bp, Lawsonia intracellularis
gatttgtttatagacataagattagtaagtaattatggttattttttgagtgatactaaaatgtttcatagtcttatttggaatttggacaaaaatagataaaggcccttatggggtatgttaaagaagctttggtaatagtttctaaggagttatttaatgcatcaaaaaagttgtttagttgctttatgtattatgtt

SEQ ID NO: 6700 - DNA, 200 bp, Lawsonia intracellularis
tattattatggtgcaagttcttcaggcaaatgcagctagctatgtggttttgccatttaaagtaaatgctcctccaagctatacttatttggaaaaagctatcccatctatgttaacttctagactttattgggaagaacgttttcaacctatcccggatgctaatgctattaaagcaggaaaggtagaagatataaagg

SEQ ID NO: 6701 - DNA, 200 bp, Lawsonia intracellularis
aaatggataaggcaaggatagctacaggtgcagactatcttatatggggacaggtaaatattgtaggtgatgaagctacgcttgatgtacaagtttgtgatatagaaggatcaatttggaggaaaagtaaaaatacaaaagttgataatttaattactgcccttcaagatacagcagatgcaattaatagtgagttgttt

SEQ ID NO: 6702 - DNA, 200 bp, Lawsonia intracellularis
gggcgtgcaactacaaaaccatcatcaaaagctactattgtagctcaaatgaactctggattgattaagggaaaaggaaatgaaaatcagtcatatcttaatccagaatttcgttatcaaggaagcaatctttcccgtggccgaagtcaagctcttccctttgcttcagttggtatagttgttggtgactttataggaga

SEQ ID NO: 6703 - DNA, 200 bp, Lawsonia intracellularis
taataaaaatgaagttgccatattaagtgagtataaagtccatatttatcgatgggaagaagaaaggttagctcttcttggagaatataaattccctcgctcactacagtctttacatattcgtgcttttgatgtggatcatgatggtgtacaggaaatcattgtttcttgctttgatccttcatatgcaaagccatatt

SEQ ID NO: 6704 - DNA, 200 bp, Lawsonia intracellularis
cgtttattcttagttttaaaaatagagtgtttaaagagttagccacaaacttaccattttatttaaatgtggttaaacttccaccagatttttctcctatgttaattggtcaaaagagtgacaattcaaggattttttctccctctggggtttatgaaatagaaaaacatggacgtaactatataatgggaaatcgtctt

SEQ ID NO: 6705 - DNA, 200 bp, Lawsonia intracellularis
agtcttccaaaggaagctaatatttttaatttttcttggttaccatcagattcattaaaagatgaagaagctaagttagtacttgtaaccaataatgaaagattagttgtatataatacaaaaggtacaagactttttatgactgaagaagtgtattatggttcttctgttggtatagacgagcccagtaatatgcctgg

SEQ ID NO: 6706 - DNA, 200 bp, Lawsonia intracellularis
tcttggaaagtcaaaagagcttatcccttctaaatattttatcccaggacggatgattcctattaatcttgattcaatggggaaatgggagttgcttgtaagcaagccaatttctgttgcagcaaaattttttgaaaattatagatcttttgctgaaggcgaaattcaggctttaacatgggacggcttaggattaggtc

SEQ ID NO: 6707 - DNA, 200 bp, Lawsonia intracellularis
ttgtatggaatacacgtcgtattaagggaactattacagattttgccttagctgatatgaataatgatgggaagttagacttagttgtttccgttaatagccatacagggattcttggactagaaaaacgaaagacaattatagtattttatcctttagaggtagataaacaaggtatccctaaggctgttgaagataac

SEQ ID NO: 6708 - DNA, 200 bp, Lawsonia intracellularis
taattttttcctattaattatttttttattctgatagttaacactactatagttatattatttactatctgttttaatttggtacaggttgatataataaaactattagatttataagtagatttcaattttataaaaggaaagtaagtagattcatcataaataaacgcttaagtaaggtataaggatggcttctattg

SEQ ID NO: 6709 - DNA, 200 bp, Lawsonia intracellularis
cccttatgttaccacggtttggactatatggcggtgttgagcagtttgcttatcgtttagcagaagcgcttgcagaagagcatagtgtagattttatttgtgctagggcagaagcttctcctccattgggtgttcgagttattattgtaggtagattgggttggtttaaatggttaaaaatagcttggtttgctatttgt

SEQ ID NO: 6710 - DNA, 200 bp, Lawsonia intracellularis
gctgagcaagttcgtaaaaaaggttcatatgatcttgttattggtcttgggaaaacatggaatcaggatatagtccgtataggtggtggtccacaatctaagttttggtctctttctgagcaagcatggtctccaggctttcatcgttatagtaaaaagtttcgtagatatgttaatcctgcaagttggctaaattttat

SEQ ID NO: 6711 - DNA, 200 bp, Lawsonia intracellularis
tatagaaaaacatcaaatttatagtcagagtactttaatttgtgtttctgaaactgttcggcaatgggtacttgaagcataccctagtattcaatctccagaggttatttataacttaccagattttagtcgatttacacctactacttatgagcaaagagtagtggcaagagctaagtttgatctagacatgggacaca

SEQ ID NO: 6712 - DNA, 200 bp, Lawsonia intracellularis
ttgctattgctacagcaacaagtaattttatgttgaagggaactagaagtttaatcaaagcaatgaagcttcttcccttaaattttaagttatttattgcagggggtagggatatatcctcttataaaaagcttgttcatttattaaaagttcaggatagagttgtatttatggggaaagtagaagatatgctttcattg

SEQ ID NO: 6713 - DNA, 200 bp, Lawsonia intracellularis
tatagagcaatagatttatttgctcttcccacttattatgatgcttgttcaaatgctgtattagaagcaagggcatgtggattaaaagttcttagtagtaaatatgatggttctagctcatttttaccccaacattggttaattaataaccctagtaattctcaagaaatagcaaataaacttttgtctatgagccaaga

SEQ ID NO: 6714 - DNA, 200 bp, Lawsonia intracellularis
accacctcctagtcctatgtatataccaagtactataaaagcaggtcttagttcttgggtgaattttattgaatttatgcttcaaaagaagtctttaatgaagatgtaatataggagtttaattgtgctaaatttgatatagctagctaagaatcaaatagtatgataaaaaataatgctgtatttattataagttattg

SEQ ID NO: 6715 - DNA, 200 bp, Lawsonia intracellularis
actacatcatattacttttttaaaataagtaacacatagtaatactataattttttgaggtaaggaaaagcaaatgaaattaaaaatattttttgtagtaactattctcttaacttcattttatacagctacagcacatgaattccttataaagtctgataaagataatgtagtaaaagaagagaaaataacaattgatg

SEQ ID NO: 6716 - DNA, 200 bp, Lawsonia intracellularis
ttgttgaaactcatgtttttataaaacctgaagagcttcctgtacttaaggatgttttactttcttttatacaaggtaaaaaatcatcagaaacaataaagcttgaatcaatttcaaaagagaatttattgcgtggcattattgatcctactactagtgaagatattgttgtttttgctaaaagattacctcaatattgg

SEQ ID NO: 6717 - DNA, 200 bp, Lawsonia intracellularis
agtgaaactacagaaggtatattagaaggtgatagagaaattttagaagcacaggggaaaaaagttttaagtgttggaagttatgaaaagtatgcccttctttttatccctggggaagattcaaaaactatttcaaactatgttgttccaggtgaacatccaccattatttcttgctccaatgtttaatccttatgctgt

SEQ ID NO: 6718 - DNA, 200 bp, Lawsonia intracellularis
gaaagtgggacaaaaaattaaatttatggtgacaagcgaaggaaagcctgttgcaaatgcttctatttcagctacctatgatggattcagtgataaagaaaatgtttatgctataactacaaaaacctgtaaaaaaggtttagtccagattagtccagattctcctgggttatggttaattacaacagaagtaaaagata

SEQ ID NO: 6719 - DNA, 200 bp, Lawsonia intracellularis
aacttgttgactctattgctgatgaaaagagcattcgttcaacaacactattttgggtaacaccctaacaaagtatatagtaatttaattgaagaaagacattaatattcactaatgtctttcttttttactatctgatttacattatatgtattaattcattatttaaccagtgataaaaatctattcttgccctttgt

SEQ ID NO: 6720 - DNA, 200 bp, Lawsonia intracellularis
gcataccattctttacgctctttctttttaattttttctgtgggttctggaacaaggccaaaatgaatgttagatggttgaaattgttttgatggacatgatatatgttcaagtaatcctccaagggcacatgttttgggaggtcttagaatttttttatctttagaaagtgcaagcaaaagtatacttacccagagacc

SEQ ID NO: 6721 - DNA, 200 bp, Lawsonia intracellularis
acaggcaatagattctacatagccttcaacacctgttatttggcctgcaagatgtatacatggaaaattacggagtgctaattgatctgtaagtattttgggtgaattgatatatgtattgcgatgcatacttccaaatctaacaaactcaacatttgaaaggccgggtacaagtctaaatatggtatcttgtgctggat

SEQ ID NO: 6722 - DNA, 200 bp, Lawsonia intracellularis
atgtaagttttgtttggcaaccaacaagatttaacatacttttattaagattttcagggcgtaactgtaggacagcgtaggggcgtaaccctgtatgaggattaataagaccgacaggtttaaatggaccaaaaagaagtgttttttccccacgttcagcaagggcttctataggcatacaaccttcaaagtgtatttct

SEQ ID NO: 6723 - DNA, 200 bp, Lawsonia intracellularis
ttttccacctttgagttggttactttttctccttttaatagtgaagaataaaatatttgatattcttcataagacataggacagttaagataatccccttctccttgttcttcatagcgtgatccccagaaagcaatggacatatctattgaatctgcagtaacaataggggctatagcatcataaaaataaagatattt

SEQ ID NO: 6724 - DNA, 200 bp, Lawsonia intracellularis
atccccaataagggttgatagtgagttagaaatgtttggactagctaatggaccagttgcaactataatacgatcatatttttcaaggaatgatgtactcaaagaagaaacttcttctctgataaggtgaattttggggtgagattcaataagttgtgtaacttgtttagaaaaaagttcgcgatcaactgcaagagctt

SEQ ID NO: 6725 - DNA, 200 bp, Lawsonia intracellularis
ttcctgcagggacacggcatgtatctgctatggccataagaggactattaagttctctaagttcttgtttgagtaaaccaatacctgtagtaagctcattagatcttaatgaattagaacaaactaattctgcaagtagaggtgtattatgggctggagagaatagctgaggtttttgttcaaatagtgtgactgagaaa

SEQ ID NO: 6726 - DNA, 200 bp, Lawsonia intracellularis
ccgaatttagctagggttagagcacattcacatccagaaagtcctccaccaataatagcaatgttatgtatattcatatcttattattaattattgttagggataggggagagcaggataatatttataaggtagtaaaaagaagtttataaaaatagattaagttattatagagagagatagtaatatattatgccaca

SEQ ID NO: 6727 - DNA, 200 bp, Lawsonia intracellularis
ttattagttcgttattgttattattattattattattaggttttattataaaagtagttatttactttttgtgactatcatctttttttaactctctggtttcccaccaacgtttatttttttgtttataccaccagtcagtatgatcagatataagaataacatgataaagttcttttgctagactactttttaatcga

SEQ ID NO: 6728 - DNA, 200 bp, Lawsonia intracellularis
ctaaaaaggttttctaaccagtttttagcataaggatttcctaaattttgttcaactttgagattaagggcaagatcaagttggtctgcatcatgagcaaagatagcctctagtgtttgacagttagaatattcatcccataatgaaagaatactttctccaatatttatacctgaaatagaatcttttaaagcttttct

SEQ ID NO: 6729 - DNA, 200 bp, Lawsonia intracellularis
ggtattagctttgacatatatatgatttatgtagttaagatcccctatacgtacttctggaaaatcatgaaataagcagagtaagcttgtatgttcagggtttgcaccacattcttttgcaaggatatagcctataattgctgttcgataagaatgttctgctacattttcttttcctgtcccaagaaaaggataaccac

SEQ ID NO: 6730 - DNA, 200 bp, Lawsonia intracellularis
ttcgagggatatatcgaagcattcctgcttcaaagaaaaattggactatgtttttgatagtgtcactatttaatgaagtataattataattattcatagtaactatatttatttttaaataattctaatagtatttaatattaataggttaacgttgaattgttttcccaacaacatagccgcttgcccaagcccaatgt

SEQ ID NO: 6731 - DNA, 200 bp, Lawsonia intracellularis
agattatatcctcccaaaaggcctgtaatgtcaagaatttctccagaaaaataaaggcctggtattatattgctttcaagggtatgagggttaacttcataggtattaacaccaccagccatagcttcagctttttttataccctctgtttcaagagggctctcaacataagcatgaagtttgttactaagccatatacg

SEQ ID NO: 6732 - DNA, 200 bp, Lawsonia intracellularis
gttttttttacttatttcagcgactttttgtgactggagattaataggaataaaattatcaataaatcgagtaggaaaaaagttttttaataagctttttactgtttgctttgtattactaaaggaatgcatataatcaataagagaaatatgaggtaagaaatttatagtaatagtttgtcctttttcccaaaaacatg

SEQ ID NO: 6733 - DNA, 200 bp, Lawsonia intracellularis
aagcctgcaaagcagcaggaccactaatacctttatgtgtaaaaagaagtggataatgaaatgtgcgttttttattatctgctcctatagtgatactaacattaaggctaattcctgctaaatcttgtaatggagagtttttttgaagaataaatggaacaagaattggccgagttggaataatagtatgacagcattgt

SEQ ID NO: 6734 - DNA, 200 bp, Lawsonia intracellularis
tttgctatatgtattcctaagtctgttgctcctgtggcaggccacgcttgacttcctaaggctagcactaaattagaggtttttagaagttgagtagaagtttttattacaaatgattttgggttagcagatactttttgtatactattttttaataaaaattggacattattttttttacattcatctataagacattt

SEQ ID NO: 6735 - DNA, 200 bp, Lawsonia intracellularis
tacaaagtgagcaacttttactttacagaagacttgatcatgggatcgtatttcccaagggatattatatttttttaggagatcgatgatatcatggggtgaatattgtaataagacatctttacagaatataggattttctcctacataccattttgggcttaaatttaagttagttatattaccttttcctccacctg

SEQ ID NO: 6736 - DNA, 200 bp, Lawsonia intracellularis
ctaggcatagtttacgcgctatagtaggtgaatgatctattattatacaagataaacctttttgagctactgtgagcccacacatgagtccagatgcacctgctccaagaatgacgacatcataatcatgttcataatcatattttggagataagttgtttgtcataaataatactatcttttttatataaccttagttt

SEQ ID NO: 6737 - DNA, 200 bp, Lawsonia intracellularis
tatgttttataaaataatttgttttgagtatagattaactagttttttgtagtatattgatatacttatttactctataaattttgttttattatattatttaacaatagtgagcaacaatatagcggaggggaaaaagttatgaatcctactagtgaagcattaatggcagcatgggagtttcgttatgcttgtaaaga

SEQ ID NO: 6738 - DNA, 200 bp, Lawsonia intracellularis
gtttgatcctgtaaagaaaattagtgaagaagactttcatataattcttgaaggtggtcgtctttctccaagttcttttggttttgaaccatgggagtttcttgttgtacaaaatgttgagttgagatctgtaattcgtgctttttcttggggtggacaaacacaaattcctacagctagtcatttggtaatcatcctag

SEQ ID NO: 6739 - DNA, 200 bp, Lawsonia intracellularis
cacggaagccagaaactatggggccaaactcttcatatgttcgaaaaacaattatggaagatacttaacatttacctgaaaatgttgctaatgctagagcagagaaatatggaatttttttgaaacatgattttaatttactaggtaatgaaagagcttgttttgaatgggtagcaagacaatgttatattccattagct

SEQ ID NO: 6740 - DNA, 200 bp, Lawsonia intracellularis
aatatgatgacggcagcagcatttttaggaatagattcttgtgcaatagaaggctttataaaagcagatttagaaaaattactatcagataaaggatacatagatccaaatgagtttggggcagcatgtatagtcacttttggttatcgtaaagagtcatctccaccttttttaaaaacacgccgtccagaaaaagaggt

SEQ ID NO: 6741 - DNA, 200 bp, Lawsonia intracellularis
tgttcattggataaattaaatttacgaccaatgaaataaaatcaaaagttctaatgctggatgaagactatggcaaaggggacagtctttagcaatagtttcaagagctattttatctttctctgtaatgtttattgtagatatatttaatatgatttctattgttttgattcttttaggctcatgggtaactattgttt

SEQ ID NO: 6742 - DNA, 200 bp, Lawsonia intracellularis
tcgtctctgcttctaatttaatgagcttaatattatgtagtaatgcatgaatatgcattgctgttataatacaggttgtaatagatgtaacaaacaagtccattgaagaaaaggaagaactttggccataattatttaatggaggatctgttatgatttttgttccactacttacatgaagacattctacttgaaaatta

SEQ ID NO: 6743 - DNA, 200 bp, Lawsonia intracellularis
ccaatatattttgctagaattacagacacacttcttcatcctattttttgttaaaggttatatacaattactatgaagaaaaatatattgtttcatctaaacaaaaaaaatttagttattaaaattttttttgttagagtattataatacattttttattatattgtgtaatatttttttattaatatataataaaacta

SEQ ID NO: 6744 - DNA, 200 bp, Lawsonia intracellularis
tctaaaatttttaaaaaagatagactgtataaaatacagtctatcttttttaattaatatatagaaaatacagaaattttagagttgatattgtaagtaacaagaaaaatatattctttcttttacttaaagttatatagatgtctaaatcctgtaaagtcaaatttctatatttctattagttttgttttatatagaaa

SEQ ID NO: 6745 - DNA, 200 bp, Lawsonia intracellularis
ctcagttttagttgtaatatatttgtttagaattatggtttgttataaaacaactgaagataataaaaaaggaatatataatgaagaggttacatattcgttttttttttttttttactctattaacattaaattgataaaataggagatcataatgaattagaagtctgtttaggtagatcatatagtccatatcatga

SEQ ID NO: 6746 - DNA, 200 bp, Lawsonia intracellularis
gttgatttatgaatacaactaatattgttatacaacagtgattatactacactctaaacctattctaaggtaaatactaaaaactaaacaacagataaacctgctggctctatatctgcaggagactaaagaaggtattcagcagggcttaaaatcagctgtaaccaatttctgcactacatccaccagtactatagtag

SEQ ID NO: 6747 - DNA, 200 bp, Lawsonia intracellularis
cctacttctgattgactacaacatgaagttttacagttattagagtgattgggagtaggagatattgcaagaggttggttaggaaaatatactaataatactacgataatataatatagttattattttttgaataatctgaagataagaaattatatagttaataagaaatttttaattattactacaagtaaaaagcg

SEQ ID NO: 6748 - DNA, 200 bp, Lawsonia intracellularis
aaaatgttgtatatagatatataatagtgcttccaatgtatttaatatattacagtataatatcataattaaataaaattatgtaccgtattttaatataagtttattatatattagtgaaccaaatttttatttagttattaaaagctagtagtagctatataaggtataaaaagatatataaactttttaataataag

SEQ ID NO: 6749 - DNA, 200 bp, Lawsonia intracellularis
ttatagttaaatttttttatgaaaaagatctaactataatagatagatgtagagaataagaaagagaactagttgatttagataaaattaattaataaattattgggaataatggtgtgcccggcaagaatcgaacttgcggcctacagcttaggaggctgtcgctctatcctactgagctacgagcacatgtttgatag

SEQ ID NO: 6750 - DNA, 200 bp, Lawsonia intracellularis
tagatttaggtatacttcactatatctgtcaagtttatttgtttaattatcttgaagttagttactacagtttattttataacacattagttttattataactattttcttttgttggttgatgaagtatttccctttgctaatcctatattgcaatgatttttatagatatgtaggaaaactttttgcctagctttgtg

SEQ ID NO: 6751 - DNA, 200 bp, Lawsonia intracellularis
tttacgatgttgtgttttatatttttctattttttttataagtaattctgagagaccaatcgatattatacatgctactattcgtcctgttgtgataacaagccttttacatttagaccaatagtcatcccaagggtcaaatattttttttgtttgcctatggttatcattagttaataattgttgtttacccttgtagt

SEQ ID NO: 6752 - DNA, 200 bp, Lawsonia intracellularis
aattttcatagctttctccttatgaaagcactacgaggactacctatgagcaagatcatgtaataaacgaaaggaatcttctaatgtagaacgatcactaatattttgttttagaaatgattctataggaccatgcattgttatagctttatctatttcttcattagagccttgaatatatgctccaatattaatcatat

SEQ ID NO: 6753 - DNA, 200 bp, Lawsonia intracellularis
cttcagctttacgaaatgttgccatatatctccccacaatacgcccatcttgaacctgttctggagtgcaaatatcagatcgtaaacggctaatagagcgtaatacatcaatagctgggaaatgatcttgatctgccaggtcacgtgtaagaacaatatgtccatcaagtatagagcgaacagcatcagcaataggttca

SEQ ID NO: 6754 - DNA, 200 bp, Lawsonia intracellularis
ttaaaatcatctccatctacaagaacagtatatattcctgtgattgtaccagtattactacgacctgttctttcaagaagtttaggtagttgtgcaaaaactgtgggtgtatatccttttgtagtaggaggttcaccaacagcaagtccaatttcacgcgctgccatagcaaatcgggttactgaatccatcataagcag

SEQ ID NO: 6755 - DNA, 200 bp, Lawsonia intracellularis
aacatctttcccttgatctcgaaaatattctgctactgctgttgcagcataagcggcacgcatacgtacaagaggagattgatcagatgtagctataataagaacagatcgtgtcattccttctggaccaagctctttttccataaactcaacaacttctcgaccacgttctcctatcaaccctattacattaacatctg

SEQ ID NO: 6756 - DNA, 200 bp, Lawsonia intracellularis
cagaagtgtaccgagccatcattcccataagagttgactttccaacaccagatcctgccataatacctactcgttgtcctttaccaagggtaatcatggagttaatagcacgtacccctacatcaagaggatctttaatacgtggtcgttcaagtggtgatggaggatttgaataaagagggattaatttttctggtata

SEQ ID NO: 6757 - DNA, 200 bp, Lawsonia intracellularis
attggatttccgccactaagaggttctccaaaagcattgaatgcatgtccaagaatctctttacctacggggaacacaggaggtaaactagtatttctaataagacttccaggttggatacctctcatttctccataaggcataaataacagattcccttcacggaaacctaccacttctgcagcaatagcctctccatg

SEQ ID NO: 6758 - DNA, 200 bp, Lawsonia intracellularis
ttcatcattcccagagagcatatgacatacagcacctagaggcgactttaaccctgttccttcagcaaccaacccaactactttatttactttaccataaacacgtaatggattgctttcttttagcagtttttggcattcttttggtgtaagtcccataaccgtactatacctttattttatttattcactgggggtaa

SEQ ID NO: 6759 - DNA, 200 bp, Lawsonia intracellularis
aatttgttaaggttacttgagatggagtattatccatatttaattcatgattactaccttgctctaccatagcagaagagaattcttccatttgcaaattttttggtagttcagaaaatatatcccgttctatattgtcatttatatcagtatgatgagatgttagtatggagttgttatcagtagatatatcagaagta

SEQ ID NO: 6760 - DNA, 200 bp, Lawsonia intracellularis
aaagaatcagtgagtgatgttgaaagagaaggattagttatagtagattcatcagtggaagatagaccagaagaaagttctttattaatttcatattgtggaatatcaggaggcaattctattccttcaagttcaggaaatgtgaattctacctcttctgatggtgggtttattaagtctatttcagctggagagatagg

SEQ ID NO: 6761 - DNA, 200 bp, Lawsonia intracellularis
ttttttatcattgggagataatgtttccttactggaaggagttttttcagaagagtcattttgtacaggagtatgttgcagtattgctgcctcttttgataatgctgtaattcctgttatatctgcaatatctgctatagattgagctgcaacaatgtcaatttcactttcaggtataattaattgttggagtatggctc

SEQ ID NO: 6762 - DNA, 200 bp, Lawsonia intracellularis
taacttcttcttttcgaagttggctgttactatctaccatccctgaacgactttctacaattacatcattttcgcccattgttacatctatttttatttcccagttttttaattctggaaattgatttttgatgttagtaatgaggtcgataatagtatttttattatttggattaacacggatagtaacacgttgtcgt

SEQ ID NO: 6763 - DNA, 200 bp, Lawsonia intracellularis
tcttcaagctgttgaacagccttgttaagaacgctatctagtatcgccgtgtgttctttggataatatccaatcagttgcaacttctgtagctgtatgtaatagttttactaaatctgaacgccagttatcaaaaatgacagtgtattgtctttcaatagtcttcagtatagaagcagcagtcatgtggatagattttat

SEQ ID NO: 6764 - DNA, 200 bp, Lawsonia intracellularis
ttgttcttttatctcttcttgagcttgctcaatgcctaatcggtatccttcttcatgagctaattctctaatatgatcagcttcttcacgaatacgttcagcttctttcaatgcttgttgagcttgcttatgaagcttatcgctttctttcttggttttttctgcccattgtttagctgtttttctaattgtttctgcat

SEQ ID NO: 6765 - DNA, 200 bp, Lawsonia intracellularis
tggcacgtgctttatcaagcattgcttgtacatgtattgttgcacgctctctcacacgtgtcatgtattctgaaacagtccgacggttccatacttcttgttcatgtgtacctatgacttgttttaatgaagattctttatcaggagaaggtcccataaaaactgtcccagtattcagtttatttttgggatggtttttt

SEQ ID NO: 6766 - DNA, 200 bp, Lawsonia intracellularis
tcatctgtagagaactttttattattcataagttttgttacctgatactacattgatagtatcttatatatactattataaaaagacatctccactaccatggttaatagtaactttgccttctccttcaagtcgtcgtacaattttaacaatattttgttgggcttgctcaacatcagatagctttgttggtcccatga

SEQ ID NO: 6767 - DNA, 200 bp, Lawsonia intracellularis
actcaagttcttcacgtaccatatttgctccacgttcagacatatttctgaaaatgtattctttaagctcatctgaagctccacgtaaggccaatgttagttcttcattagaagtttctttaagaacttctctaattgatcgatcgtcaagtccttttatatcttcaaatacaaacatgagattacgaatatcttcagcc

SEQ ID NO: 6768 - DNA, 200 bp, Lawsonia intracellularis
atctgtgcagaatcctcttcaatctcagcaagaacttcttcttctgtagcacggtcaactgcgttaaggatttcagctacagattgaacaccaccaacttttttcccttctttactacccattgcaatgagttggctttgtaaaaccctatcgacttctactaacatatcttctggaactgattctagtttagcaagtct

SEQ ID NO: 6769 - DNA, 200 bp, Lawsonia intracellularis
aataagtacttcagctcgaactccagcaggaagcataataagtaagcttgctgcttgttctgggctaaggtgtccaaggattagcgcaagagtttgaggatgttcattacgtaacatttgggaaagaagttttgggcttactttttcaagttctttaaaaggagcaggtccggactcaacgttaagtgaatccataatat

SEQ ID NO: 6770 - DNA, 200 bp, Lawsonia intracellularis
atttagctgtttcaccatcaaggtttttcataagcatacgttttagactatcttgaccaccaataatgagatcttttcctgtaactaaatcttggtgaaatgtacgtaatacatcttctacagtatctttagaaactgtatctaagtctataacagctttagatatagcagcaatttctctgcgttccatacgtttgaac

SEQ ID NO: 6771 - DNA, 200 bp, Lawsonia intracellularis
acttcagcagtgaatttatcacccaacacaagtaataaaactgctgctttttgtgttccagttaattccatatagttgactccttgacataggtatatggtatttatttaactaggatatatggtttttatgtggatagatggcatactatcttttataaatgcaatctgcatgcctataaagtttttgctaggagttaa

SEQ ID NO: 6772 - DNA, 200 bp, Lawsonia intracellularis
aattatagattaggagaacaacaacttaatttatactatatctaatgtatcaatatggataaaaaatagtataggtactaaaaatgttaattaagattcattcatccatctacgaagaatacgaattgtagaatccatttgactttcagcaagattaagaacatgctttttaagctcttctacacgctttcttttttttg

SEQ ID NO: 6773 - DNA, 200 bp, Lawsonia intracellularis
aacgagattcttgcatactatgtttttcactaggctgaacatcaggtgctatgttttggttaagagaaccaactgtattaagaggagattgctgtttttgtatcatctttcatccatcctcgaagaactaaaatagattgttctatattattttctgcaagttgtaatgtataattttttatatcttctaagtgcttaag

SEQ ID NO: 6774 - DNA, 200 bp, Lawsonia intracellularis
agattcaaattcttcttcttcctcagaggctattcgtacagcctccattgcggctgctttagcagcttcttcttgtgtttcatataatgctaattgttcttctgcagaaggtaacccttcaaggccttctacaatggcttctgattctacttttggacgtataagagcaaggataacaggtcgtacaactaacatgagaa

SEQ ID NO: 6775 - DNA, 200 bp, Lawsonia intracellularis
atagaaatgctaatagggcattcaaaagtggtttcccaagtcgttcagcatacttagcaatgacttctgctgcaggtggttctataggtaagtctgcttcatcaaaaggaatagaacttacttctattgtatctcctcttgcacgatcaaagcctatagcatgtgagacaagaagacgtatacgattaagttcttcttgg

SEQ ID NO: 6776 - DNA, 200 bp, Lawsonia intracellularis
gaacgtggtacaaatttatattcaccatttggttctttaacataagtcccatctacaacaacagcaacagtcattcgatttatttgtccaacttctccaacaatattttgttcttcacggttaatttcgtaatttgtggtacgggtttctcttgttccttcttgtgtactcatagctccatttggaccatctcctcgaaa

SEQ ID NO: 6777 - DNA, 200 bp, Lawsonia intracellularis
gtttacgtcgggtgagccagattcaagatttgattgtcctcggtttgtttcttcacttctttgttcagaacgtataacagaactattaggatcataaatttcacgacggatagttttttggttaaaatctaagtctacattgactttagcaataacttttccctgccccataagtgggataagtagttcatcaatacgac

SEQ ID NO: 6778 - DNA, 200 bp, Lawsonia intracellularis
gttcaagcccttgttctacttttaatttatattcacgttgggtgacactaagccctgctaaattatcttcatttgggaaataaagaggtttcccaagactatctgttatagagacatgctctttatctaatccttctacagccataacaagcatattaaccatcccttgaacttctttttggtccatttttcgagatggg

SEQ ID NO: 6779 - DNA, 200 bp, Lawsonia intracellularis
tttttaagttttaatacaacagaagctgatggtttttgttgttcttcaatgaacaggctgcgttgagggataacaagatgtactcgtgcactttctacatttgggaattcactaatggtgcgagaaagttcgccttgtaatgctcgttggtagttgattctttgtacaaaatctgtttgtccaacattaacagcatcaaa

SEQ ID NO: 6780 - DNA, 200 bp, Lawsonia intracellularis
aatttcgaatccaataccagagcctaccatcccaccttcgccagcaatttttattcgtaagtcatatacactggaagcaggaacaaggattgtttttccattatctgctaattggtaacttactttgtctgcttgtaatgttttgataatatgatttgcatcttcaggaccaaggttagaatataatactttataatcag

SEQ ID NO: 6781 - DNA, 200 bp, Lawsonia intracellularis
tacgattaatccaaaacatgagtcctataaatatgagggtaacaaatactgctgagccaccaataaaaagtttttgtgtgaggttactattattccaaaattcagtaattcgggcgataatttgactaataaagttttgcatgcatcatttcctagtggaattatgtcaaaaatatatctaacactaattaacagatatc

SEQ ID NO: 6782 - DNA, 200 bp, Lawsonia intracellularis
taattctagatatctaatttttcttttatagagataagtgtcagaaaaattacactagaattgtaatctactaagttccttatatgcttctagtaccttattccgaacagccgatgtcatgtttatagctaacccagctttttgtaatgtaatcataagttcatgaacgttttgtgtctccccagaagcaaatgattgaa

SEQ ID NO: 6783 - DNA, 200 bp, Lawsonia intracellularis
tcatttgactttttgttgtttgcatttcgttaacatttgaaagagaatctttaaaagtatcagcaaaacttttttcaacaggtttactttggggtatagctgcagacttttctttaaaagtatcttgtacctttttaaagtcactcattacatttgtgtaagctttaagccctgttgactggatactcatagttttcccc

SEQ ID NO: 6784 - DNA, 200 bp, Lawsonia intracellularis
ataatatatatatatattagttagattacattaaaatattcaattattctttatcctctacctatatcaagtgccctcatatacatatttttgacggtatctatagttgttgaatttgcttcataattacgactagctgtcatcagatttgccatttcttcaacaacattaatatcagggtaagagaccattccattttc

SEQ ID NO: 6785 - DNA, 200 bp, Lawsonia intracellularis
gtcagcatcaggatggcctggttcatatatttgtttaggtggtctattatctggtaatacatttaaaatacgtacaccttttagttcacgatcaagagcagattgcatttgtttactgaatggttcatctacatctgttgctgcacggatgaccgttttacgtctataaggaccaccttctggtgtacgtgttgttttag

SEQ ID NO: 6786 - DNA, 200 bp, Lawsonia intracellularis
catttgcaaggttcattgcagtaacgttaatggtcgttctgtcagcgcttagtgctgaggcaccaatatcaaaagctgtcatgaagtccataattatacctttgatccttccataataatattttttaccccatcaaggttacctttaatcacttgtgttaatgcattatattgtaaagagtttttggccatatttgcca

SEQ ID NO: 6787 - DNA, 200 bp, Lawsonia intracellularis
tttctttatcaagatttactctatcttcaccatggactacggttggttttattgctttatcccactcagcattgaatccttcaggattaaatacagctggcaaatgattttcttcagtacgtgacatacggccacgcatgtctagacccaaagctttttggagttgatcttcaaattctattgttctgggtctatatcgt

SEQ ID NO: 6788 - DNA, 200 bp, Lawsonia intracellularis
ggcgtattaacgttagcaatgttactcatgataacattctgacgttgtagctgcatgtccataaccttagcaacaaggtttacatgtggttcatacaagcttttcatgcatacgcctccttactttcaaagctcaatgctgggtgataaaagtaataagcaaaacatatgccataggtgagttatctaagcttctgatat

SEQ ID NO: 6789 - DNA, 200 bp, Lawsonia intracellularis
aggaggattattatatattgttatttgtcaaaaaatgaacgtcataactagtccttttagtttagttacctaacttaggtttatatgttatttttatctttttaaagttaacatattttaatagttatctttttactagttatttgttcacctttaactatgtatagttgaataattttttgtaatgataataagctaag

SEQ ID NO: 6790 - DNA, 200 bp, Lawsonia intracellularis
tcagagacatgcaggattgtaatgataatggtaactcaagatcatattttttgagtagttgttcgttagatagaagttctgctgatggtccatcagctttaatttctcctttactaagaattaacactcgatttgcaaaatgaagggccatatcaagatcatgagttgcaattaagattgcagtatcaatttgttgtaat

SEQ ID NO: 6791 - DNA, 200 bp, Lawsonia intracellularis
aaatggataaaatttttccttgatttaggatctagtgctgcagtaggttcatcaagcagaagtaattgaggatggctaataagtaatacagctaacgcaacacgttgtttttctcctaatgatagtcgttgtggggggaagtctaataaatgaaaacagtcatattgtttagctattgcttcaataagcatttctttatt

SEQ ID NO: 6792 - DNA, 200 bp, Lawsonia intracellularis
tttttggtagatagaagattgggttagtgcaaaaagaaattcttctcgtacagaaggaaaaagcagttgtacatcagggtgctgaaaaaggaggcttgtatattttcctgcctttttaggactccctgtaatatcattattcataatttgaacggttcctgctagaggttttaggcagccagcaatagttagaagtaatg

SEQ ID NO: 6793 - DNA, 200 bp, Lawsonia intracellularis
tagatttaccagaaccattagctccaattaatgctactttttcattgttatctaatgaaaatgaaatatagtttagtgtgttataactagtaggtaatataaaagaattatgtaagttatatttaaagagaatattttctactttaagcaacattactcccctcaagtattaaaataatatgttacagtgactgtcataa

SEQ ID NO: 6794 - DNA, 200 bp, Lawsonia intracellularis
gcagtataagaatacagactgaaatatctttatatgttgtttttggataagagttagaattatacataattggggaatttttttgcaatagtaccattcggatattatttgcacggtctatattatgcactaaaagtgttcctacaaggtaagcatatgcttttagttttggaataccttttagttttggtgcccgtagt

SEQ ID NO: 6795 - DNA, 200 bp, Lawsonia intracellularis
gaaagactttgtaaagcagagataatatctttatgtaataagcaaatatgttgatagaataaaataaaaagaacaataagtttattggaaatttttagtgactgtagcgttttaccaaactcatgtgggttattggttacaaagcttatcaaaaaaagtgcagtagcatttgtttttagtgtgagaataaaagctagttt

SEQ ID NO: 6796 - DNA, 200 bp, Lawsonia intracellularis
aataccaactaaagaaatagagaaatgtgggaatattgtgataggggtaggatcatatatcgttaaggggaaagtaatccatacaatgattataaaaatattgataggtaaaagtattgataatacttttttaatacttttactccatagagcaataattacagccatggaaaaaagtattcctatgctaattaatgaat

SEQ ID NO: 6797 - DNA, 200 bp, Lawsonia intracellularis
ggttaagaatagttcctattataagaatgattgcacaaaataagccagctcttggagttaagatatctaaaagtggatgatttggtttaccatataaatcaaacttcattacaataattattggtagtacaattagtagaagacaagagctctggtgcaactttctgtaaaaatacaatagctagtatagtaataattcc

SEQ ID NO: 6798 - DNA, 200 bp, Lawsonia intracellularis
ttctaatatagcaagtgggacatttgctgtaagtaaagttaatgcaacatatttaaattgttgattacttaaaataagtgcaaggtacaataagcatgttgctagaaaaatagctccaaagcctgctataaaagaaaaaagttttattttattaggagattggcagtgtagtttttgtctaaatattagtgcaataagaa

SEQ ID NO: 6799 - DNA, 200 bp, Lawsonia intracellularis
gagcaggtagccccataacaatacaatttacacctaatgcaacaatccctccaaactggaataatattgcttgtaacattagtgaaatacaaatagctgggaaagtcccccaacctaaaataagaccaagaagacctagtaaagcaaaatgtgctgaggtaggtccaataggtactcttattagagaggtaaggaaaaat

SEQ ID NO: 6800 - DNA, 200 bp, Lawsonia intracellularis
atacttgaaaatacagccatagttggtaagcatgaataagtaatacggcgtaatgatattactagtaatataatagtacaggtccaaccacctgctagtacaggtacggataatactccctcacttatgtgcatgacaggatttcctatatttaaagataataaataatccgataaatatgttaaataagagacttacgc

SEQ ID NO: 6801 - DNA, 200 bp, Lawsonia intracellularis
ctaaaagagctcttaaccataaaggcattgccataataggacatacttgtgttgtggaatttaaggatgacactgtagtagatgtttgggtaaggatatcatcttctgtaagtgtgattggtaactctgcacgatgaccaacattatcactcatgataatagtccaagtcccttgagtattgggtataaaagcaaatcga

SEQ ID NO: 6802 - DNA, 200 bp, Lawsonia intracellularis
ccaaatttatctgttctagcgttttgatattcaatatttttattttcagggctgtagacttctatttttgcataaggaacaggttcacctgtagaatatagaaactcaacaccaataggctgttgtgttgtaataatttgtcctgaaacgccatgtgctaatgcttcatggacaaaagaacatagtagtaggaatataat

SEQ ID NO: 6803 - DNA, 200 bp, Lawsonia intracellularis
aagaaaaaaatatttcatagttgatatacagccttagaagtaattaagttagttaactagtgtaacaagatttaattcaatatcattaagtaatacatttttaaaaaaaatgatacgctaatgtcaatctctttattttatctagtccagtatcttatttatatttcattagttagaaagaagtataaaataattatgag

SEQ ID NO: 6804 - DNA, 200 bp, Lawsonia intracellularis
gaggaactatgttaattgggtaactaattttttgaaatagttttgtataatattggatattggtgggaaaaaatagaatgcaagtatgaaataaaaaatactaaatgttattgtattaatagcaattgtgagaagatataaaatgaagggtgaaaaagatgttaaaaaagaagaagttaaagttgtaattatccaagctg

SEQ ID NO: 6805 - DNA, 200 bp, Lawsonia intracellularis
ataatcctgatggaatgactataaagcaagatctcatgagaattgtttttagcccagtaaatgctgtaataccaaaagttttgtaccatttataactaatgaggaacgtatatgtaataatagatatggcggtaagagaagctatccctatactaccccatgatttaacagcaatagagaaaaatggtataaaaattact

SEQ ID NO: 6806 - DNA, 200 bp, Lawsonia intracellularis
gtagaaaaagttcctattaatgctggggttaaagtattttgtcgagcataaaaggctcttccaattacttgttggactacccaaaatggtactgagaagagcataatttgtagtaatggtgcagtaagcactgtttgtatatgactgaatcgacccccttcaaaaataattcctaatgttggtagggcaataccaatcat

SEQ ID NO: 6807 - DNA, 200 bp, Lawsonia intracellularis
ccatccggttataggtagtgcaattattaaactaccttttagagctttattaagtgtttcattgaattttgtattattatttttagcagctagtgtagctaaaaaggggaatgaggctacactaatagattgagctacgactcctactgggacaagcataatgcgtcgtgcatagtttaagaggctaacagcaccttctc

SEQ ID NO: 6808 - DNA, 200 bp, Lawsonia intracellularis
ctgcaagagaaccaaatatacgtattaattgttcgtcaagtataataatggattgtccaagcataagaggtagtgctagccaaagaaaatgtttcatgagtggatgtcgtagcgaaaagtagaagtggataccatttattaatcctactccaaatggtaggaggaaagcacctaatgcagctcctataaggaccccccaa

SEQ ID NO: 6809 - DNA, 200 bp, Lawsonia intracellularis
caaaatccttccattccattagaagaagaaattagtccacctaaaataatacagctgttataaataattggcataagcgctggaacaagaaattgttttcgaatataaagtaaagcagagatacatgctccagaaataaaaaatatttgaccaggaagtataatgcgtaggaagaatccaagacgttcctgattagaggc

SEQ ID NO: 6810 - DNA, 200 bp, Lawsonia intracellularis
tgtaaatcctggtgcagttattttagcaaggtcataagcaaaaaaccatgctatgaatgttgtaacactgatagctattgttgcccaataaaagactgtggaaaagaatttccaaccattttgctcgtcttcttggaatgacttggaaagaagaggaattaatgtgatggaaatatacccaccagcaaggaggtaattaa

SEQ ID NO: 6811 - DNA, 200 bp, Lawsonia intracellularis
taaagtctgggataacaaatgctgcaaaataaatatctgcttcagacgtagctccaaactcccatgatattactttatcgcgaataagccccatgaccctagaaagtataacacttcctgccataataagagctgccattcccattttataagatgttgttagccacatgtggatagtctcttttatccttttttatttg

SEQ ID NO: 6812 - DNA, 200 bp, Lawsonia intracellularis
gttatgctaaaaatagtatagtaggttcagagtgataaaaagattgctataaatttaatgtaacttatcaagatcccactcaaaggtaagttcaccttcttctgctgttgttcttaatggtatatcgtattgtaataatgcattatgaactttagtagaaggaaagtcattagtgtttaaagttcctgtactggcaacag

SEQ ID NO: 6813 - DNA, 200 bp, Lawsonia intracellularis
caacagtaggatggatttttttatataattcaggaagaaaacttgatttagagccatggtgaggcaatacaaggacttctgattgaacttcaaggtttgttttgagtagttctttgaggtcgttatgttctgcatctccaggaagaaaagcaagaccatggtttttagcaactaaacgcaagataagtcctgtgtttcct

SEQ ID NO: 6814 - DNA, 200 bp, Lawsonia intracellularis
tttggaattacaccttttggtggtgataagacttctaagtagatatcgttacttaatggaatttgttctccacgaataagagcttttcttggtatacgtttatttttaagtattgtatcaagttgtagcaaaagaggtgaggcattccctttgggagaatcaattgctggtaagatagcagagtagacctgatcaacatt

SEQ ID NO: 6815 - DNA, 200 bp, Lawsonia intracellularis
aaatacatttgcaagaaaaagaaagcccttaatatgatctctatgaggatggcttatagcaaaaaagtctaaatggagagaatgagttgtagataatataggtgccaaaatatctcttcctgtatctaagcgattagaataaaatccaccagcatcaatgagtgctcttttatttttcccccactctataagaatagctt

SEQ ID NO: 6816 - DNA, 200 bp, Lawsonia intracellularis
gtccttgtcctacatccataatacgtaatctaattttattagaattatcttttgataagataaaaaagagtggggtaacaactagtatcataccagcaattaatatacgttttgctggtgtagtaaaacctgttctacctagctttatcccaatgcttaacaagataagataacaaccaaggagcatagtccaagatggt

SEQ ID NO: 6817 - DNA, 200 bp, Lawsonia intracellularis
ctaggtagccaaataggacttattatttctgtattttttaagctaagtaataaacggataagaatttcacaaggtatttgtgctagattaatacataatatcccaatagatgtacattgaagagaacaaaaaagtagactaacaaaggcaaggggtaagacaaatatccccaatataggtagccaaataatgtttaatgg

SEQ ID NO: 6818 - DNA, 200 bp, Lawsonia intracellularis
aaaccaaataggaatatagccaaagacatataggcatagaggaagggtgcatatctgtacaataagtgttgtacctatagtaaaaataataatttttatacttgttgttatagttgaataaagtatctctgaggttatagttgtagatatccttttgtggattgctttccaacatttttgtaacaatgggttaaaaaatg

SEQ ID NO: 6819 - DNA, 200 bp, Lawsonia intracellularis
aaatacttaatacggctaaaaaagaaagctgaatccctatatggtatatcccttgaggatcaaataagataaggcagattagagctataattgcaatatctaaaaagcatattggtttattttgtataagataaatagaccatataaataacataattgttgcacgaagtaatgaaggtggtgcacctccaatccataga

SEQ ID NO: 6820 - DNA, 200 bp, Lawsonia intracellularis
tatagaagtgcaaagggcaaactaaataatgggatagccttgtatcgtggtaacgaaaggaaaaaacaaggtaaaatttttataagaattatgataatagttatagatgctatacttattacagctaggtgttgtccagataaagctaagctatgtgccagtcctgtgtagcatgtaactgcattaagtgtatgtgaaag

SEQ ID NO: 6821 - DNA, 200 bp, Lawsonia intracellularis
aaaaaatcgatctccaaataataaggctgggataaaacttttttctggtggtatatgaagagttgtagacttttgtgtagtaatagattgttgattgatattgcttgtttgctgaatacattggataaactgatgataaagtttcccacgtaaccatgaactaaaataaggtgtcccagaaataataggatggactgctg

SEQ ID NO: 6822 - DNA, 200 bp, Lawsonia intracellularis
catcttttgaccatgcttggaaataaacgttttgtctataccagtagttagctatattataaccacctttattacggaagccttttatcggtcgaactataactcctatagtaactttttggcctggaaggatcatatctctatttattgtggggttttcccaggtccaaagaagttgacttggtaagcttacaattttt

SEQ ID NO: 6823 - DNA, 200 bp, Lawsonia intracellularis
gaaatattatttatttcattttgttgagaaaatgaagcaggataaacattttttaaaataaattgtaagcgattacctggaatgccttgaactttttctattgtccctgtgatctgaataggcttatgcttttctaaacatcgagctaaccagattggcgtatattgtggttcttttggtttggatagtatcccaataat

SEQ ID NO: 6824 - DNA, 200 bp, Lawsonia intracellularis
tgaaccaaccgtaatacatataataaaaaggctgaacgtgttccatttccaatatcggctatcaatccaaagaaatatgagagatgcaacaaaagcatataatgggaattcaatagcaatgatcccaatgagagatactaaaacaagtgattgccaaaaaagaagtggctgtattaccggataataataactatttgttt

SEQ ID NO: 6825 - DNA, 200 bp, Lawsonia intracellularis
tagttggccttaaaaatatatttcttactaataaagatggtaagatagttgagcatggataaaagtataaaacacaattgtctcatataaaaaatatagaagataattttaatgtatattaatagagcagtgaagttttttgtataaaaataaaaaaggtttaaagtaaactaggttatattagatacatattaatactt

SEQ ID NO: 6826 - DNA, 200 bp, Lawsonia intracellularis
atttataacttaatataaataagttactttttaaaagtgttatattgtttaagctaacttagctataaattttatataacttaatgaatagaatgattatctactaagaatagttagagtaatattctttggtttcagatagagacagtagcatattaataaattcatattaaaaaatgaaagattcttcacagagaaat

SEQ ID NO: 6827 - DNA, 200 bp, Lawsonia intracellularis
agtttaaaaatacattctatgaggcataaaattttatcttgttatctaatataatatagtgttatttaggtaaggagttataatttgaaactagtgatacatttatattgttagagaatacttttaaatttatatagttatgataaatagttgggttgtacattagtcatatgtaagtcaacaacttctattttatcttc

SEQ ID NO: 6828 - DNA, 200 bp, Lawsonia intracellularis
ttgtatggatgtatttaagaataaacttcctatcctagcaaatcgaactttatcgtcagttgtaagaaaaatagtagaaccaattaggtttgtgtttggatttaccatattatgttgaatgatacatgcttgaacaagttttgctgttgctactgtggagtctacaatagttatgtcatttccaataattttttgtatag

SEQ ID NO: 6829 - DNA, 200 bp, Lawsonia intracellularis
tttctgataatagaggatagtgtgtgcaccctaagacaagacagtcgggttggtctttaattgagcgattaaaaaataaagaggaaagatagtgtataatgattgattcaacaatagggccactaaaccaaccctcttccacaataggaacaaataatggacatgctttactctctacaagaatctctggtcgatatcga

SEQ ID NO: 6830 - DNA, 200 bp, Lawsonia intracellularis
aggatagtttcttcataacatttcccttgaatagtagactctgtcgcaataacagctacatgtccttttagtgaagttttacaagcaatttgggcgcttggctcaataacaccgattattggaataaatggaaaagtttcttgaagtaaaggtaaagctgctgctgtagctgtattacatgcaataattaagagttttat

SEQ ID NO: 6831 - DNA, 200 bp, Lawsonia intracellularis
ttgtcgttctataagagtagaggctgattgtatggcataatgcaatactgtttttggactttttgttccatagggtaaacgtgctgtatcacctaaataaagatagttctcgtttggcataagattctgtaaagcctgtagtactgttagccctcctacaccagaatcaaataaaccaataggagaagatttattcatta

SEQ ID NO: 6832 - DNA, 200 bp, Lawsonia intracellularis
tttcccccagtaaattatatctatgattatagagatagatgtaatatatagaatttcaaatgtatcttcaataattatcctgcattatggagaataacatataggtatatctataaagctatatagcaataaaataaaatagaggattatccactgtaatagtgcagctcttattatagataaaagttttttattatagt

SEQ ID NO: 6833 - DNA, 200 bp, Lawsonia intracellularis
aataatataaattaatttgactatactcataagacgtaattacttgcaagtaaaggttattcacttagttatataaggtaacttagattaattgtacatttttttttaataacttaatttcgtcatttttaagaggtcgtacttcacctggttgaagattagatagattaatatttccttgtttaactctaataagttta

SEQ ID NO: 6834 - DNA, 200 bp, Lawsonia intracellularis
agaatagtaaggcctaactctttacacatacgacgaatttgacgattaattccttgctgtaaggttatttcaagccatgttgtattagtttcagttatgctagatagaacacgaactttagcgggtggaagctttgttccatcagaaagcgttatccctttggatatattttttaatgttgtatttaaaatacgttcacg

SEQ ID NO: 6835 - DNA, 200 bp, Lawsonia intracellularis
aataagaacatggtaaactttagatatatgataacgaggatgtgttaaccgttgtgtgagttcaccatcatttgttataagtaagaggccctcagaaaaaaagtctagtctaccaacaggataaaggcgatagtttttccatgggaatggaataaagtctaagacagtaagacgattttgaggatctttgactgaagaaa

SEQ ID NO: 6836 - DNA, 200 bp, Lawsonia intracellularis
taactttaatgggtttatacattgatagatagtaatattttttattttttagttgaatatctactcgacgtccatggagtgctataatatctttatctggatgaatgtatattcctggttgtgtgacagatttcccattaatagttacctctccatttaggatatatttatcaacattacggcgtgagcagactccagca

SEQ ID NO: 6837 - DNA, 200 bp, Lawsonia intracellularis
ttagctaatgctttatttatacggatgctagttgtggtagaagattgtgtatggtttcttagaagttgtggtatctgtttttgttttgtttgcatatactaatagttgtgtaagggttctcttttataagagatgttgtcgtggtcttcttttattataatacataactagttattagtcataaaaagaaatgagtctat

SEQ ID NO: 6838 - DNA, 200 bp, Lawsonia intracellularis
atttaggacttagagttatttttattatagttttattaatttcttagatgtgtcaaggaagaatgaatgataaaaaaattattccctttttttttcttaaagaatcaaaatcaagaaaaacaaactattataagggttcttcaatatttttatccatataagtgggctgttataacagcttttattgcttcaggtattgt

SEQ ID NO: 6839 - DNA, 200 bp, Lawsonia intracellularis
ttctttgtcaacagcaggtattgcttggcttatcaaaccagctcttgatgatatttttattcgtaaggatgttgaggctattgtatatatccctattatttttattattttgactcttctaaagggtattggtcggtatgtgcaaaactggtgtatgagctatagctcttttggggttcttgaaaaactacgtcaggaat

SEQ ID NO: 6840 - DNA, 200 bp, Lawsonia intracellularis
tatttcataagattataaggttacctttatctttttatgaaacatcacagactggttctcttatgtcctatgttattaacgatgtaggaatgattcgtcagagtttaccagcaattatccaagctgtaagacagtttttaacaataggtggactactatatgttgtttttacacaaaattttagtttagcttgttgggca

SEQ ID NO: 6841 - DNA, 200 bp, Lawsonia intracellularis
ttaattgttttacctattgcagctttcccctttgttatgtttagtgtagcattaagacgatatggtcgtcgaagtgctgaaattatagcaaagacttctagtttactccaggaattattaagtggcattagaactatcaaagcttttgctactgaaaaagaagagatagagcgttttgatatagaaaatagctatatttc

SEQ ID NO: 6842 - DNA, 200 bp, Lawsonia intracellularis
taaacttagtttacgccaatcaaccatttctgagttatcctctccggttatggaacttattggttctattggtgtagctatagctatttggtatggtggaactgaagttcttgaagataaaatgacaccaggaacttttttttcttttgtagctgcattaattatgctttatgagccagtaaaggcgctaagcaatgcca

SEQ ID NO: 6843 - DNA, 200 bp, Lawsonia intracellularis
atatgtctttacaaaatgctttagcaggagcagagcgtatttttagtatactagatgattcaaagctgcatatagaaactggagggagtgtattatgtggaaaagagttttatgaattaacgtttgaccatgtaacattacgttatgacagtgttagtgaacctgcattaaatgacgtaagtcttactgtaaggactgga

SEQ ID NO: 6844 - DNA, 200 bp, Lawsonia intracellularis
gaaaaaattgctctagttggtccttcaggagcaggtaaaagtacttttgtaagtttgataccaagattttataatccacaggctggttctattttttttaacggaagattgttaacagaatatgatcttgtctcattacgtcaagctatggctatagtttcacaagaaccatttttatttaatatgagtataagagataa

SEQ ID NO: 6845 - DNA, 200 bp, Lawsonia intracellularis
cattgcttatggtcaacctttggaagttagagataatattataaaaattcaggctgcagcagtagcagcatttgctgatgaatttattgatttactacctgatggttacaatactaaggttggtgaaaggggtgtgaaactttcaggaggtcaaaaacaacgtattacgattgcaagagcattgcttaaggatccttctt

SEQ ID NO: 6846 - DNA, 200 bp, Lawsonia intracellularis
tgttgattcttgatgaagctacaagttctcttgattcagagtctgaaaggatggtccaaggtgcattggaaaatcttatgagaaatagaacaagtttaattatagcacatcggctttctactattttagaatctgaccgtattattgtatttgaagatggaaaaattgtatcttctggaaaacataaagagttgttagga

SEQ ID NO: 6847 - DNA, 200 bp, Lawsonia intracellularis
agttgtgagttatatactcgtttatatatgatgcaatttagaactggtgagtttcaggatgcgcctatcgaaaaaggttgttaaaccactatgtaaaatattagagtggcctctttatggattatattgtctatggtgtgggacacttcaatataatgcgattaataggcaaagcgttgactctagaacagatgctggac

SEQ ID NO: 6848 - DNA, 200 bp, Lawsonia intracellularis
ttccggttatattatgtttatggcatgatgagttatttcctctcatttattttagggggaaattaaaaatcattactgttgtgagtaaaagtaaggatggagatatactagctaatgttattcaacggatagggttagaaacagctcgtggttctagttctcgaggtggctcagaagcattgcgtaatgtaattaaacgg

SEQ ID NO: 6849 - DNA, 200 bp, Lawsonia intracellularis
atgaaggatgggttttgtgcttgtatcactgtagatggccctaaaggaccacggcataaagttaaaaaaggtgtaatttttttggcacaacagacaaatgcacctatagtacctattcgaatatttatggaaaagtctaaaaagataagtagttgggatagatttcagctacctataccttttagcaaaattcacgttat

SEQ ID NO: 6850 - DNA, 200 bp, Lawsonia intracellularis
atgtggggatgcatattatgtatctccttccttaacaactcaagaagaacttactgatcaatgtaggttattagaagaacgtcttaataacctgaggttataatgcatgggggatatttctacacttacttctttaacatataaatatttccctctgctatttcataaattaggtttgtctaagttacgtcttattgcta

SEQ ID NO: 6851 - DNA, 200 bp, Lawsonia intracellularis
gtatactaagtacattatcatggtggtgcctaccttttaggagagggttagctttaagagcaatagaaaaacacttagatgtttctttaccaacagcaaagcggttagcaaaagagagttttactgaaaattttttatcatttcttgagagtatgctaattccttcttttggttttgaatgttcttcattaataatggct

SEQ ID NO: 6852 - DNA, 200 bp, Lawsonia intracellularis
caaggagatcttttaaaaaaaatacaaatgttgcaaagacctattgtggcaactacagcacatttgggagcctgggagcttttagcaggtctccttggggacttttcaacagtaacccctagtgctgttgttgtaagaaattataaaaatacatttatacatgagataacaacaaaactgcgttcaagtcgtggagctat

SEQ ID NO: 6853 - DNA, 200 bp, Lawsonia intracellularis
agttttaggacatcgtcaagctacacgttctattttacgtatactgcataaaaatggtacagtagctttcttagttgatcataataccagtcaaaaggaagcaatttttttacctttcttaggagagctagcagctataaacataggtccagcattacttgctataaggtcaaaagcccttgtcctccctttgtttcttg

SEQ ID NO: 6854 - DNA, 200 bp, Lawsonia intracellularis
taagagaaaataataagtatattttttgggttgatgatcctttagatacctgtcttcttaaagggaataatactgaaaaagtagaaacagtagccagtttttatacagaagctgtggaaaaagccattcttcgtactcctaatcaatggttttggatgcataatcgttggaaaacacgtccatctatctagtgttatata

SEQ ID NO: 6855 - DNA, 200 bp, Lawsonia intracellularis
ttttggaaaaattaaacagttaagtctatcactttagtggtatgcttaacaactaatattatatttctaacaactaacagaaaacttaattagatatagttataagttacaactcttcactggttagtattaatatataattagttagagtagttaaaagtgaataactaattaaaataattagatgtataacattaaag

SEQ ID NO: 6856 - DNA, 200 bp, Lawsonia intracellularis
ttaataacaagctaatagaacagtagagtctaataactaactgttaataaaagatatagggatatttatagttgtagagtaacatttttagatctctcaaggctttttgctatattttataaagctacttttttaagtttataggtagcttttttattttaattttagaaagttataataattaagaacaaattagttac

SEQ ID NO: 6857 - DNA, 200 bp, Lawsonia intracellularis
agagttactaacaaaataagaacatattttgtgctcaataagcttaaaaaacttaataaattaaagtaattaaatatattatgtacaatgctagataaatattattctaatttttcgtagttaagaacaatttaggaacaataattattcttttttaagaaaaaatagtatatctattctagttaagaacaattttagta

SEQ ID NO: 6858 - DNA, 200 bp, Lawsonia intracellularis
acaatagaagtaatgatatgaaagattgatgagatactatatgcaactcatctattgttttgttggatgactaatatggttctaaaaaaggacaaaaagtgaactataataattagaataaataagatattttttaactagttatggttttagttatataactttgttgataaagaaattaagtatattattagtttctc

SEQ ID NO: 6859 - DNA, 200 bp, Lawsonia intracellularis
aagctagagaggggtgctggtatacatcctccatgtttaataaaggttgttgcattacctttagggacaggagtaatagtagcctcgccaagtaatccaccaaaaaaagctttttcaccaacttttttccctgggacaggaattatacgaacagctgttgtttttttattgattactccaatagccatttcatcagcaat

SEQ ID NO: 6860 - DNA, 200 bp, Lawsonia intracellularis
aattcctgaaatagttgatgcaggtgtatctccagggatggcaatcatatcaagtcctacagaacagacacttgtcatagcttccagtttttctagggataatatatttgattggactgcagcagcaatgctagcatcttctgaaacaggaataaaggcagaagataatcctccaagttgtgaagaggcaaaagcaccac

SEQ ID NO: 6861 - DNA, 200 bp, Lawsonia intracellularis
ctttttttatagcatcatttaacatagcaagagcagctgtggatcctggagcaccaatagaggataatcccatactttgaaagatttctccaactgaatctccaatagaaggagttggtgctaatgatagatctacaataccaaaagggatttttaatctggaagcaacctctttcccaacgatttctccaactcgagtt

SEQ ID NO: 6862 - DNA, 200 bp, Lawsonia intracellularis
attttatatgctgtttgtttaataatatcatataattcagtaaaagtacatgtatcacaagtagacaaagctctatcaatagctttttttattactccaggcccagaaacaccaacattaataacaacatcaggttctcctattcctaagtatgcaccagccataaaaggtatatcttgaggaatgtttgaaaaaacaac

SEQ ID NO: 6863 - DNA, 200 bp, Lawsonia intracellularis
aagttttgcacaaccaataccattagctgtacttgtagctgatgcaacatcaagaattttttgtcccataagagcaactgcatccatattgatgcctgcaagagaggaagcaacatttatagaagaacatactcgattagttactgcaagtgcttcaggtagtgattcaataaggtttttctctccaggagtcattcctt

SEQ ID NO: 6864 - DNA, 200 bp, Lawsonia intracellularis
tttctataagagcactataacctccaataaaatcaacacctacactttctgctgtttcatcaatgagttgacaggttttgataaattgctctgtagaaaaagatgccccaagtactccaataggactaacactaatacgtttatttataatgggaataccaaaatgttcttctacctgtttacaaataggtacaagttca

SEQ ID NO: 6865 - DNA, 200 bp, Lawsonia intracellularis
gttgcataacgaataattttagagctaactcgataagcaaaaatatcaaaatcatgactagcacagtcgaaaaggtttataccaattgttatagtacgaatatcaaggttttcattttgtatcatattcagggtactaataatttcatgtcctgttatcataatatctccagttaagctaattttcttattgctatttaa

SEQ ID NO: 6866 - DNA, 200 bp, Lawsonia intracellularis
ttaatatagataataaagaatagaacattttagttttatttttttgtctatgatataatggtactataaatagtgaaagtttttctcttagaaaagaattatagtattggtatacgatgcatagcttcaaaaatttgagaatgttggatagttatattactactatgtggttgtaattgaagtttgaggtcattatataa

SEQ ID NO: 6867 - DNA, 200 bp, Lawsonia intracellularis
agcgtctttatttattaaagatgataatgtaatttcacaactaacaaaagaagtttgagacctatcatctgtatcaacaacaagtttttcaatattaatcttatattgtgttattacttttgataatatggtaataagattgatagagtctttacccttaacagtcactataaatttcgaattatttgtactaagatgta

SEQ ID NO: 6868 - DNA, 200 bp, Lawsonia intracellularis
aaggtataggatcatgaaatggatgaattgttatgtgaaggtccatatttttttgtaaaaaggtgttagataattgttgatgaataatatgattatctaatctgtcaggctttattataataaaaatagctgcaaattgatttttaataactgtttgactgacggtatcaaacatacagttaagttttaacaatgtatca

SEQ ID NO: 6869 - DNA, 200 bp, Lawsonia intracellularis
gagacggtataaataactccaggagagtccattccaataatagaaataacacttttattcataggttccttaactcataataattttttattttattatatcatattctcttttttctttaggtacaattaaagacatttccagttttctcatgagaaaagtaaaaagttagtatttgattctatagtaaagtgtacaag

SEQ ID NO: 6870 - DNA, 200 bp, Lawsonia intracellularis
aatatcataagatatttttatataaaaaatactaactaagcatcatttttttttgaggagggttttatgtcattaagcccattgaattatgctgattgggaaatagcccaggcagcagaaaaacatatgaaaacagtatatgatcttggtaaagatcttggattggaccataaggaaatatttccttatggtcattatat

SEQ ID NO: 6871 - DNA, 200 bp, Lawsonia intracellularis
ggggaaagtagactataagtctgtactttcaaggttggagcaatcatctgatggaaaatatattgatgtaacagctattaccccaactcctttaggagagggaaaatccactactacaattggattagtccaaggccttgcaaaacgtgggaagcgatcttctgcagctatacgacagccatcaggaggaccaaccatgg

SEQ ID NO: 6872 - DNA, 200 bp, Lawsonia intracellularis
gggttaaaggttctgctgctggaggcggtctttcacaatgtattccacttacacaatattctcttggttttactggtgatattaatgctgttatgaatgctcataatttatcaatggtggcgttaacttcacgtatgcaacatgaacgtaattatagtgatgaaaaattgtatgctttatctaatatgaaacgattagat

SEQ ID NO: 6873 - DNA, 200 bp, Lawsonia intracellularis
attgatcctacaaatatacctatgggatgggtaatggatttttgttgtcaatcattacgtaatattattataggaatagatggggtgagcgggaaatcagacggatatatgatgcgttcgcattttgatattgctgtttcgtcagaggtaatggcgattcttgctattgctaaagatttaaaagattttagacaacgaat

SEQ ID NO: 6874 - DNA, 200 bp, Lawsonia intracellularis
tagtaaaattattgttgcatatgataagcaaggaaaagctattacaacagcagatcttgaagtggatggggctatgactgcttggatggttgaagctattaatcccaatttgatccaatctatagaaggacaaccaatttttgttcatgcaggcccttttgctaatattgctattggacaaagctcagttattgctgatc

SEQ ID NO: 6875 - DNA, 200 bp, Lawsonia intracellularis
gtttaggtttaaaattaagtgaataccatgttactgagtcaggctttggtgttgatattggttatgaaaaattttggaatttgaagtgtcattatagtggccttactccagatgctgcagttattgttacaacggttagggcattaaaaagtcatggaggcgcaccaattcctattccaggacgtcctctcccaaaagaa

SEQ ID NO: 6876 - DNA, 200 bp, Lawsonia intracellularis
tatacagaagaaaacgtagggtatgtggaagttggctctgcaaatttaatacaccatattaacacagtaaaaaaatctggtgtaccaccagtagtatgtattaatgcatttacaactgatactccatctgaaattgctaaaattagacagttatgtgaattggttggagcaagagttgctgtttctaagcattgggaata

SEQ ID NO: 6877 - DNA, 200 bp, Lawsonia intracellularis
tggaggagacggtgctttagaattagcggatgctgtgatagatgcttgtaatgaagaaaagaattttttgccattatatgattggtctcttccattgaaagagcgtattgagaaaattgcatttgaagtatatggggctgaaggagtggagttttctgaagaagcaatctataaactaaataaattacaagcagataaca

SEQ ID NO: 6878 - DNA, 200 bp, Lawsonia intracellularis
atagttccgacttgggtgtatgtatggtaaaaacacacctttctttgtctgatgatcctaaacaaaagggtgtccctgatcattggaagttacatgtaagagatatcatgttctttggtggtgcaggatttgttgtacctattgcaggttcaattacacttatgccaggaacaggttctaatccatcttttcgtcgtatt

SEQ ID NO: 6879 - DNA, 200 bp, Lawsonia intracellularis
gatgtggatacagatacagggaaagtaaaaggaatattttaaaaaattttttagagaaaaagtataaaactaggagtattatggctgcagatattattaatgggatggaaattagagaatctattcttgaggagttacgtggagaggtagctaatcttaaaagggattataatgttgtcccaggacttgttacaatctta

SEQ ID NO: 6880 - DNA, 200 bp, Lawsonia intracellularis
gttgggaatcatccagcatcattaagttatgtcactcttaaaataaaaacagctattgagttaggttttcatgaaattcaagataaccagtctgagacaattacagaggaagaactcattggtattattaaaaagtataatgaagatcctcttattcatgggattttagttcaacttcctttacctagtcacattaatga

SEQ ID NO: 6881 - DNA, 200 bp, Lawsonia intracellularis
ggggaaagtattacatgcgattgatccaaataaggatgtagatggatttcatcctatgaatcttggaaggttagttataggtggtaatgctattacttttttaccatgtactcctgcaggaatccaagaacttcttatacgttcttctgtagaaacgttaggagcagaagttgttgtcattggtagatcaaatattgttg

SEQ ID NO: 6882 - DNA, 200 bp, Lawsonia intracellularis
gtagaccaatatcaattatgcttactcaaaaaggagtaggtggcgatgcaactgtaacattggttcatacaaagtcaaaaaatattgttagacattgtcaacaggcagatattgtgattgctgcagtaggtgttcctaattttgtaaaagctgaatggattaaacctggagctactgttattgacgtaggtgtaaatcgt

SEQ ID NO: 6883 - DNA, 200 bp, Lawsonia intracellularis
attggttttaatgaagatacagggaaaccaatactttcaggagatgtggattttgttaatgtaagtcaggtggcaggaaaaattacacctgtaccgggaggggttggtcctatgactattgctatgcttatgaggaatactgtacgttcagcatttttccatctttctttatgaatagctatgccctattttttctgtat

SEQ ID NO: 6884 - DNA, 200 bp, Lawsonia intracellularis
gattgctccaaacataatatctgttccaaaacgatcaggtattccttcccattgtttttttagagaagcttgtggatagtcttttagaaattgtatgacttgctgttcattttcggatggatttactgtacatgttatataaataagttccccctgtggtggaagaaactcccaagcagtattaagtatttttttttgta

SEQ ID NO: 6885 - DNA, 200 bp, Lawsonia intracellularis
gttggataagtttatcaacatcttttggtgtacgaaatttttttatatcagggtgacgagaaagtgttcctaggccactacatggtacatctaataagatagttttaagttgagagcagaggacattttttagtgcaggctgggtagaagaactacagaagatagatggagttaaaagtttaagacgtttagtctcagct

SEQ ID NO: 6886 - DNA, 200 bp, Lawsonia intracellularis
attaacccttgtaatttactaagagaaatatcacttgctgcaaaaattggtataccccattctaataataatgatgttttcccacctctacctgcacaggcgtcccatataggtatcttccatgtttggatatcaagggcatccataacaatctggctacctgctccttggatagagatgtatccttgttcaagataata

SEQ ID NO: 6887 - DNA, 200 bp, Lawsonia intracellularis
ttgtagctcctttggttttctatttggtttgaaatatattcctgaacgacctatagggattccaccattttgacaaagattttcatatagttccctccagttgtcatatattgggtttactcgaatgcaaaaatatggtctttgtaaagaggatgctgcaagttttaatgttttttgtgttccataattagaaatccata

SEQ ID NO: 6888 - DNA, 200 bp, Lawsonia intracellularis
gtttaataatccaaagtgggatgctataccaaatagaaagataatggatatcttctggtagtctttgtttataaaaggtattatatttaggtccatcattatgtttactttttctaaatattgtttgaaggctagcattagctactcctgcaaggattttaccaaatttagatttaatagttgaaacagctgtatgtata

SEQ ID NO: 6889 - DNA, 200 bp, Lawsonia intracellularis
gtagcataaggaggaattttatcgagaaatagtaactcataggtagcaagacctatgataagttttacttcataaggaagatgttcagatttttttaaaaattgctctagaatccatactatacgtatttctaatcgtaagtatccataaacaagctcagtaactaaagcaatatcttgtttggataatggatatgtcaa

SEQ ID NO: 6890 - DNA, 200 bp, Lawsonia intracellularis
aagtatattattcaataatacttggataggttggccttctttaattttttgcagtgctattgttgctatttcacgagctgtttttgttttttttctattagtatattttttttctggtgatttaatcatttatatatttaaagaagatagtaatagtgatagtggataaaaaaagtagttatgaatgttaatgtccagta

SEQ ID NO: 6891 - DNA, 200 bp, Lawsonia intracellularis
atattatatttttttagtttatattgtagtaagctttttgataatcctaataattctgctgctttgacttgtgtaaagtttgtcctagcaagggctcggcgaataagtgttgcttcaattttttcaagtgtagctgctaaatcaatttctacagggagtaaatctacagcacttttaaattgagcttcttcatctttaat

SEQ ID NO: 6892 - DNA, 200 bp, Lawsonia intracellularis
ttcagatgggagatcatcaatagaaattatgtcattaggaacaaggactaggcatcgttctataacattttgtaattgtcggatatttcctggccattcatatccagtaagatagttgagagcttcatctgtaaaatttttagatttaatatcattttctgatgcaattttttcaataaaatgtgcaactaataaaggga

SEQ ID NO: 6893 - DNA, 200 bp, Lawsonia intracellularis
tatcttctcgtcgttctcgtagagggggtaggggaatatggacaacattaagtcgataatagagatcttcacgaaaagtcccattttgtaccatagactgtaagttttgattagttgcggttacaatacgtatgtctatatctaactcttctgttccacctactcgttcaaattttctttcttgtaatacacgaagtaac

SEQ ID NO: 6894 - DNA, 200 bp, Lawsonia intracellularis
ttgacttgtaattcaggtgtaagctcccctacttcatctaaaaagagtgttcctttatttgcttgttcaaagcggcctcgacgcatagcaacagcaccagtaaatgaacctttttcatggccaaatagttcactttcaagtagtgtagggcttaatgccatacagttaacagaaataaaaggttgttgacttcgtgggga

SEQ ID NO: 6895 - DNA, 200 bp, Lawsonia intracellularis
agaaaaatgaatagctcttgcaacaagttctttccctgtcccagattcacctgtaataagtactgttgctctgcttggagctgctcttgttacaagtttcatcatatcttttattgcattactgcgtccaataatttgatgctttccaaaacgttcttcaagactttcatgaagtatacgatattgtctgtgaatttttg

SEQ ID NO: 6896 - DNA, 200 bp, Lawsonia intracellularis
caagttctgcagcattttttatggaaagaagaagctcatcattagcaaatggtttagtgatataattaaaggctccatacctcattgtcgctaccgcattctcaatagagccaaaagcggtcattataagaattgggatatgtggccaacgttgttttacatattctagtacttcttggccacttatttttggcattttc

SEQ ID NO: 6897 - DNA, 200 bp, Lawsonia intracellularis
atgtctgtaacaataatatctacttctgactcctcaagaaatgctaatgctgtttcaggatcattgagggctgtaacttggtacccttcatcttttaagagggtttccaaaactaataagtaatttttttcatcatcaataagtaaaatatgttcaggcattgtgagtccaatagctacttttaaaatactggtaagaat

SEQ ID NO: 6898 - DNA, 200 bp, Lawsonia intracellularis
gattagtcatagtttctatattatgattattttgaagtaggaagtaaaatttgtattagtgcaccaccattggaatcattttttagtataagcttcccatgatggctttgaataatactatttgcaataggtagccctaaacctgtgccattatctttagttgtataaaatgggctagtaacatgttggatttgatcctg

SEQ ID NO: 6899 - DNA, 200 bp, Lawsonia intracellularis
agggaagcctgccccactgtctttgaaagtaagttcaataaagccatctttatttttttctccattaatatgtatgaaaccatctttattaatagactgaaaagcattaatgagtatattatataatgctctatagagtaaagatgtatctccataaagttggagttctgatgaaatatcttttgaaattgtgatatgtc

SEQ ID NO: 6900 - DNA, 200 bp, Lawsonia intracellularis
tttttgttgcttctccttgtaagaatcctagtacttgttcaaggactgaattaagattaagaagttcttgtttaggtattttagggcgtgcataatctagaaagtcattaacagtttgacttagacggcaggattcatcatatattgcagttaatatttgtttattatcaggatttatatccacagcacgacgtaataat

SEQ ID NO: 6901 - DNA, 200 bp, Lawsonia intracellularis
agttctgcactagagcgaataatcccaaggggattacggatttcatgtgcaatactagcagtgattcttcccatacttgcaagtttttcattttgatgtagttccatttcaagacgatgattttttgtcatacgttctgagaggatccgttctgctttaacaataaaaaattgtagaaggataaagagtataattgaaga

SEQ ID NO: 6902 - DNA, 200 bp, Lawsonia intracellularis
acttaggcaagtagcaagtataagccattggaatcgaatgatataaccataatcatctgtgatatcttgtgttatttcaagaagtcctgttacaatggattcagaaggttgtgtttcttcatttccagtaaaaggaattgtaagagggaaaatagtacgtaatataaagctattaggtggtagttttaaggtaaacattg

SEQ ID NO: 6903 - DNA, 200 bp, Lawsonia intracellularis
cagatagtagacttaacgtagaaagaatttcaaaagagggtgaaattgtttctatagcaggttctgctgttggaggaatatgaccatcttgtccaagttcatctttatttatagaataagtaacaattttatccattccataaatacgtaagctatttatatgaagtccatgaatagtagataaaataacttcatcaagt

SEQ ID NO: 6904 - DNA, 200 bp, Lawsonia intracellularis
tgtttatattgaataggttgccgtaatgctattctaccaaatgttaagaaggttggtagagtaaatcgacgataaatttgatgatttaaatttccaacgataagtaacgcatactgttgctgtcttaataataaagtatgtcgagcagagttaccaataaataatgcaagtacaatacttgagataagaataaggactaa

SEQ ID NO: 6905 - DNA, 200 bp, Lawsonia intracellularis
agatatccatgagagaaatcgtgtaaggccaaaagggagttttgtttttatagcaggtttttgggacactttaggtgggatcctccagagaggtagtattaagaaatgactgaaggatagctgcctctttaggataatggttatctcctaatttgactcgagcaagacgtttaccaagttcaacggcaggttgatcaaga

SEQ ID NO: 6906 - DNA, 200 bp, Lawsonia intracellularis
ggattaatatgtaataaccagccggtaaagagtgttgtggtcattaaaagtcccatcagttcccccgcagcataacagtttgtgttgtcaaattgaagttgtaataatggtacatcatgtgtaacaagagcagctgcggttcctattttttctgcttcaataagttcattaagttgtctatgttttaaccaagaccagtt

SEQ ID NO: 6907 - DNA, 200 bp, Lawsonia intracellularis
ttcagggatagttggtggaaagacaggtccaggtatatagttttttgttgataataagatacaacctttatcctttgggccatcaagaaacatttgttgggtagaatgttggtctgtaactcctattgcagagagaggcatacttccttgtccagacttaccaagactttccgcccaaagttggataaaccattgtccaa

SEQ ID NO: 6908 - DNA, 200 bp, Lawsonia intracellularis
acattgaccatgtagcaatataattaaagaaaataagttgagtatatccattttttaaaagagtataacaccattttgctattgtccaggcaggatgtttttggagactttggattgttacatgacgtaatgggagcattatttgattggctccattaagaagctcttcccattctatacctaaaaatgcagaaggaatg

SEQ ID NO: 6909 - DNA, 200 bp, Lawsonia intracellularis
agaccaaccgcagatagtacagagtatcgtcctcctaagtttttaggaactggtaatgtttgaatgttttctttttgagcttcttgtcttaagaatccagaatccggatcagtaataaataagcaatgtttttgccaagaatcctttaaagtagtttgtaaccatgtttttataaggaaatattgtgccatggtttcaat

SEQ ID NO: 6910 - DNA, 200 bp, Lawsonia intracellularis
agtttctcctgatttactgatagtaactactaatgtttttttagggtttaaagatgtaagtagtgcattcatgctttcactatcaatattatccataatccaaagccagttaccactatgattaggtctatcttgttcaggtgcaaaagctttttgtagtgctttagctcctaatgcagaacctccaatccctaaaacaa

SEQ ID NO: 6911 - DNA, 200 bp, Lawsonia intracellularis
ccatatatttaaatttatgtaataatggggtaatatgattaatttgttgtttaagtttttcttgataactcatagaaataaaaggaagaatgtcatcagatagatcttggtttagccgagttatgtattcttcaattggaagtggtgattgtaaagattgggttagacggccttcccatgcgtgattccaattaatgtaa

SEQ ID NO: 6912 - DNA, 200 bp, Lawsonia intracellularis
tacataatatttccttagttattattttgttactatttatttactactttactgttctaaggctaactatttttctatttactatagattactacatagcacatattggtaacttattggataataatctgattatatatttgatgaaataatgtatatatgttattttagaatattaatttcttttattttagtacatt

SEQ ID NO: 6913 - DNA, 200 bp, Lawsonia intracellularis
agtatcttatagttagttatgttgaagttaactactatactccaattctataaaaagatttaagaatcgtagtaggttatgggaacttcatatgatgtgttataattctgaatgaattagttttctactaaaagctatatagttctaataagcaatcttaatgttattctagtagaatataaatagatatagacagttat

SEQ ID NO: 6914 - DNA, 200 bp, Lawsonia intracellularis
gaatggtatagatattattactaatagactgatattgaataaagagatattaatttgaataggaatagttaatggaaaaaacaattatttatttcccgaaaggttgtgttattgggaggtttgttaaaagatataaacgtttttttgttaatgtccttgtggacggtgaagaagtagtagcacatacaaataatactggt

SEQ ID NO: 6915 - DNA, 200 bp, Lawsonia intracellularis
tcaatgttaggattacttaattctgggactccagtattattatctcctgcattaaatccaacacgtaagcttcaatggacattagaacttgtttggacaggagggacatatcctgatgaaaacaaacttccttcatttccaaataaagaaggaggggtaactccattccattctggtttaggtttttgggttggagtcaa

SEQ ID NO: 6916 - DNA, 200 bp, Lawsonia intracellularis
tacattaatccctcataaattttttaaattagcttttgaagcaggtttatttccttggactaaaggttattctatctgtaatactgaaactaagataggtatgagtcgtttagatatttgtttacatggaaatggagttccacgattatgggttgaatgtaaaaatgttacattagttgaaaacaatgttgctttatttc

SEQ ID NO: 6917 - DNA, 200 bp, Lawsonia intracellularis
cagatgctgtttcactaagaggtcttaaacatcttcaagagttgaaaaagattatagatagtggtgaacgagcagcaactttttattgtgtgcaacgtaaagatggtaagttttttggtcctgccgcttctattgatcctcaatatacagaaatgttttggaaagtaaaaaagagaggggttgaaatatacccttatcat

SEQ ID NO: 6918 - DNA, 200 bp, Lawsonia intracellularis
atagatattacaactaaaggtcttagtcttggccctatattgccattattatccgaataaagaataatacgttagttagcagaatgtatttttaaaagaaaattttttatgggggtaataaaaaagagtttccatatagtaacactcattattactaggtttgcaatccaagcacctataataggcgatataataccttt

SEQ ID NO: 6919 - DNA, 200 bp, Lawsonia intracellularis
attcccaagagatattcctattgtatttaatgcattatatataaaagtataaagaagagaaaaagctatagcaatataaatattatttttccatgctacaatagttgtagctaataatgccattactacaagggagaatgaatatgaaagcttggtgtgccaactagtttttaatagttctacattagatcctgaacgtt

SEQ ID NO: 6920 - DNA, 200 bp, Lawsonia intracellularis
ctaatttatgaatagtttctcttaattcccaaaaagaaagttgttgaggtgcattattattttggatgaattttaacgtttctgatgattggttaaaagtaagtgttaactcttgcaacatttcttgtgaatataaagctggttctgagactgcaactttttttaatatccattcattattgtgaatagaaaaagataat

SEQ ID NO: 6921 - DNA, 200 bp, Lawsonia intracellularis
gcccagatgattttttctattgtaagaccatttttatctaaaagatatgcgctaaatccactacctgtatcatcaggcttgagtgtatttatggatactatccaatttttatctgtaaaccagatatcttttagaatagtttttgatttatgttggttatggacatattcttgccatatttgaagtgattttcgaccaca

SEQ ID NO: 6922 - DNA, 200 bp, Lawsonia intracellularis
agctgttcctatatattctgaaaaaataaactgtattgtcccccaaaataaacttgctataattataatagaggctattcgagtgaaagatatgcctccagcttgaagtgctattaattcttttttttttgccataatgcataattgaattaccgtagaaattaaaaatataaatggtaatatttgtgcaatagcaaaag

SEQ ID NO: 6923 - DNA, 200 bp, Lawsonia intracellularis
gtgttttatatataaaatatgttagaataattttagttgaagtatgagcttctataaaattatctaaacgttcaaaaagatctgttaaaatatatacaccaataccgatagttagagtcaatagtaaaatttttgtattattttttattagataacgaaatagaagactcatcttataccttttattttccttagtatat

SEQ ID NO: 6924 - DNA, 200 bp, Lawsonia intracellularis
ttgggataaggtatacaatatttgcagttttttcacgtgatgtaagatagataccatagagtccaagtaagaagaagagtatatttggaagccataagccaatggcaggagggatagtaccagattcgcctgtgctaaatccaaaagacattaatccataataaataaaaaacatgataagcgccagaataagtccaaac

SEQ ID NO: 6925 - DNA, 200 bp, Lawsonia intracellularis
tgtctatgtatcccttcaaacatgattgctaaaggtagtgcaaaaattgtaagagcaatacatgctgctgggtaagcccaacgtttatgaagttcaacagaaattttgttttggtattgcatagtatttgttatattatactcttttataagcctttcccaagacatttctttagggcgtaactcgttgaagtttatatt

SEQ ID NO: 6926 - DNA, 200 bp, Lawsonia intracellularis
tttaagaagagtagtaagtgggattcgaacaagatattgatcaaaagaaagaaatgatgttttatttagactcattgtgtagatattaccatttgttaggttaaagattaattctccttttgtaggatttgtttcaattgttcctgttggagcaaggataacaagatggcgatctttttgagagcgatcttctagtaaga

SEQ ID NO: 6927 - DNA, 200 bp, Lawsonia intracellularis
tttgatgtagttctcctgaaagagggtctacctgtcgagcaaaaagaacaaaacctgggaagttgttattaaaaactccaggttgtatggaaatttttacttttgttctagctatatctaaaagtgttgtcttaaattgttccattccccatgctatccaaaagagtgatatccataatgtaagtaatgtacaaaaaaaa

SEQ ID NO: 6928 - DNA, 200 bp, Lawsonia intracellularis
ctaaatgctagaggtgcaggaagcatttgatatatacttataccagaagcttttaatgcaataagctctttatctaaattcattctaagaaaggttagaaatacacctaacatacaagcaataggtataactaatataagaaataatggtaccatgtagctaaaaagaattagaacatctaaaatttctaatttaagacc

SEQ ID NO: 6929 - DNA, 200 bp, Lawsonia intracellularis
tataaaaaggtctctcatttgtatagcacgatttataataataagtgttaataaggctcctactactaggaagaatatgtatgtgctttcacggaatatttgacgttgaaggagggggatcataataaaagtatgttatattttttgggtagtattgttgttttgtattagttgaggagaaaaaatttttgtaagatgca

SEQ ID NO: 6930 - DNA, 200 bp, Lawsonia intracellularis
ttgcatctagtggggtaagattaaaacgcatactagcttcgtctattagttctactattgatattgatggacgacttttgtgtgcttctatcagaaagtttagagcattttgaataagctgattatgttttataatagacataatttagagctcttttgatgtatttggctccatagcaatatacttacattcaggggcc

SEQ ID NO: 6931 - DNA, 200 bp, Lawsonia intracellularis
attgccttaagataatttttaaaccgttcaggagtttgttcaaggactggaaacgttccccagtgcatggggataaccattttacatttaagcatttttgcagcatatgccgcttgataagaatccattgtaaagaatcctccaataggcaaaagtgataaatgaaggttatatagtttcccgaacgttttcatagtttg

SEQ ID NO: 6932 - DNA, 200 bp, Lawsonia intracellularis
gaaaattcctgtgtctcctgggtggtatagtgtaaaattgttaggcatagtgataatatatcctgcaggagaaccagactcagatgtatgaaaagattgtgtcatagtgatacgtacaccttttctctctattgttccaccaatgttgaagccaatttcaccaataatgaggtgttgtggcataccttgttgtataagtt

SEQ ID NO: 6933 - DNA, 200 bp, Lawsonia intracellularis
tatctgcagtaccaacaatacaaccacaaagtgcacctgtagatttacagattgcaatggcatcaccaagatggtccgaatgatcatgtgttataagaacaatatcaggtttttgaatttcattccaattttttgtacatcttggattgtttgtaaaaaagggatcaataagaacagatattccattagcattaatttga

SEQ ID NO: 6934 - DNA, 200 bp, Lawsonia intracellularis
aagttagagtgtccatgccaaataatagttgtattcattggttaaaccctccactaatgatcattaagttaatagacagagcttataccttgacacagtatgttacaagggctagtttccccatctatgcgctcgtagctcagctggatagagcgttagcctccggagctaaaggtcacaagttcgaatcttgtcgggcg

SEQ ID NO: 6935 - DNA, 200 bp, Lawsonia intracellularis
caccagttagttttttgtagccctctgtgttaaaagaaaaaatatacttaatgtataacttgtaaaactacaatctggctatgattgtttttctgcttaggttgataggattattaatgagttcgtattttttgtagtaaagttataaggttaaactaaggattcctgagttgtcttttatcacctattctaatggttaa

SEQ ID NO: 6936 - DNA, 200 bp, Lawsonia intracellularis
tttttctttatcaaaatactctagtaatggaatactatactttctgggaagtcctccagataactctttaaatgttgcaatatcaagttctttatgggaattaaaccaattctgaagtatagattttagtttttttattgcttgtgtagagtaatacatatcttctgttatatgagtaagagcttttctttctaaaagta

SEQ ID NO: 6937 - DNA, 200 bp, Lawsonia intracellularis
atgtaataataggagtggcttgtttgatagtactatttaatgtcgtaagaatattgctcaattttggaggggtataaccagcttctatatataattttaatatgttgtcgtagagatgttgttgttcaaaagaaagagaaatagtatgtgaaggtaaatagatataattcccttcagaggttaaatttcctttttgaatt

SEQ ID NO: 6938 - DNA, 200 bp, Lawsonia intracellularis
agttggttgataataaaaccaataagtttatgaggaagaattttaccccatattttataatttgtaaaaaaggttccttgttctattccttgcttaattgggttttttttatgaaaatttgttatagcaactaaacattgttcaactaatgttttcattgtgttaacagacagatatccatagttttctttatcaaaaca

SEQ ID NO: 6939 - DNA, 200 bp, Lawsonia intracellularis
tataattatacctctttctataaaagaagttaatatagatagaagacgattatgttcaatattggttactatagataatgttgttaaatatattcctgtggcatctaaaaattctatttgttttttgacaagttcttcttctgttgcagatggaagagaaagaagagtatctatagtgtgatcagtaatagtatggcgtg

SEQ ID NO: 6940 - DNA, 200 bp, Lawsonia intracellularis
agataggtgacgctatagggttaactatactcccaccagcaacagtttgtaatggtgaaaaggttcgaataacaacatggtcaccaaatattccaactaatggtttttttaatctgatttcacataggatagtttccccaggggcaagagagtttttattaaaaaaatatagctgtgctagaatttcctgtgttccatga

SEQ ID NO: 6941 - DNA, 200 bp, Lawsonia intracellularis
tgtaagtggacttctgaacaatgttttagtggacgaggtgaagatggtaggcaggttagggatatcagccaacgtgttgaaagcactaaagtgtcaggatgagcaagtatatcaccacgtttgacttctgaagtatttattccatgtaaattaatagcagtacgttggccagcatatgctgtttctactatattaccatg

SEQ ID NO: 6942 - DNA, 200 bp, Lawsonia intracellularis
atattggatttgtttaacttttgtttttttgtttgaaggaagaatagtaatagcttctcctgtagctatagaaccagatgcaatagtccctgtgacaacagtcccatgtcctttaatagtaaagactctatcaataggtagacgaaaaatatctgttttttgtttggagtgaggtatagaaagataatgattaagatgag

SEQ ID NO: 6943 - DNA, 200 bp, Lawsonia intracellularis
ttttaaggtttttgattccttctcctgtagtagaagatacttgtaatattggtgtattatgaagaaaagtgtttttaaggaatagtttaatatcttcctttataacttctaaccattctttatcaactatatcagttttggtaaggacaatgaacccatgttttatccctaacaatgaacaaatttctatatgttctttt

SEQ ID NO: 6944 - DNA, 200 bp, Lawsonia intracellularis
gtttgtggcataactccttcgtctgctgcaataacaagcataacaacgtcaattcctgaggcaccagctaccatatttttgataaatttttcatgaccagggacatctataatgcttagtttttcccctgtaggagaaacatagtatgcaaatccaaggtcaattgtaatgcctcgccgtttttcttcagatagtttatc

SEQ ID NO: 6945 - DNA, 200 bp, Lawsonia intracellularis
gcaattgatacctgtaagtatttggacaagggatgtcttaccatggtcaatatgtcctgctgttccaattactatagacatttgtgctactttataacgcctttgaaagaattaacacataattacaatgtaatttttattactaatcaaaaataataagctattatattatatactagttagaaataactaaaggttag

SEQ ID NO: 6946 - DNA, 200 bp, Lawsonia intracellularis
gttgtgaagttggccctaagtatttatgtagtatattcccaatagataaaagagtagattcgtcaaaggcttgccctattagttgtatccctacagggagtccttttacaagtcctgcaggaatgctcaggccaggtaatccagcaaggtttaaagaaacagtaaaaatatctttatgatatattgtaataggttttttt

SEQ ID NO: 6947 - DNA, 200 bp, Lawsonia intracellularis
atagtagaacctatttcccaagctgttattggagaaacaggtgttaataatatatcacactttttaaatactgataaaaaatcttggaggatgaggtagcgtacttgagcagctttatgataataattttcataatagtcagttgaaagaacatgtgttccaagtaagatacgtcgtttaacttcttctccaaacccttt

SEQ ID NO: 6948 - DNA, 200 bp, Lawsonia intracellularis
tgttcgagagtttatatataattcttctaatgtatgactattttttgcacgatatccatatcgtacaccatcaaaacgtgcaagatttgatgaagcttctgctgtggcaataatataataagtggcaatcgcatgatctgtggcatgaggaagtgaaagatcaatagtttttgcaccaagttcttttgcttgttctatag

SEQ ID NO: 6949 - DNA, 200 bp, Lawsonia intracellularis
cctgttggtagatatcaagtataggggggtcaatatgttcagaaataaattcttttgggataccaatggttatacctgttaagtcttgtttttttaggttaatataatagttatctgttgctttaaaggatgatgtagtatcttgaggatcatgtttagccaagacagaaagcattatagctgcatcttctactgtgcga

SEQ ID NO: 6950 - DNA, 200 bp, Lawsonia intracellularis
gttattggtccagcttggtctaaagaagaagcataagcaataataccatatctagaaactcttccataggttggctttaaacctatacatccacatagtgctgccggttgtctaatagatccacctgtatctgtcccaatagccgaaaagcattgaaaagctgctacgctagctgcagagcctccacttgatcccccagg

SEQ ID NO: 6951 - DNA, 200 bp, Lawsonia intracellularis
gacacattttgtattccaagggttatatgttggaccaaaaaaagaggtttctgtagaagaacccattgcaaactcatccaggtttgtttttcctataataatagcaccagcatttttgagttgctgtataataaaagcatcatactgaggtataaagtgtttcaacatgcaagaagctgctgtagtagggatattctttg

SEQ ID NO: 6952 - DNA, 200 bp, Lawsonia intracellularis
taagaatattatctttaaccgcaataggtataccccaaaggggttttttaggatcaggagtagactgatctagtttttttgcttcacttagtgcttcttctgcacagattgttataaaagcattgatagtaggctctgtagcaataatacgatcaagacaagcttgtgtaacttcttcaacacttttttctcttgagata

SEQ ID NO: 6953 - DNA, 200 bp, Lawsonia intracellularis
agtaaattatgaatttgtgcaagagaaaggtgtatatcacttgtcataatttcccttatagttagattttattatacaattcgtggaacaacaaaaaatttttcgtttgcctctggtgaatttgtaaggaattcccttgggttaggggttggtataggaatatcatttcttttattatcttgcataattgttgatgggtt

SEQ ID NO: 6954 - DNA, 200 bp, Lawsonia intracellularis
ataaagggcaggtatatttgttgtttctacttgaactaatttttctatatcatgtaatatatctttatattcatcattaaattttttaagtgtttcactggatgtgttaagttttgccagttgtgcaagataagttaaatgttctattgttaacataaaatttttatttgaaatttaaggaatcttagagagcaatatat

SEQ ID NO: 6955 - DNA, 200 bp, Lawsonia intracellularis
acactaattatgtcatgagtggtaaatagaatcaagtgttattagtgactgatgacaatttttgaaagatgtaagtcagttttattggacatcaataaaattgcctggaactgatttcccaggcaattcaatatgtgtaggataagccataaggatagaatgtttattggaggcgtttttttattatagcatataatcac

SEQ ID NO: 6956 - DNA, 200 bp, Lawsonia intracellularis
cacggttaattttagctttttctacgacagccatgatacttagctcattaaccatagattctaaatcagaattaggaggttgtatgtttgcaagatttccttgtaaatttttagtatgattttctatagtggtaagtttttcccaagctccacgtgttgttattccttcttctagtgctgagctatattcatcccatgaa

SEQ ID NO: 6957 - DNA, 200 bp, Lawsonia intracellularis
tttaagagtatacttgcttgttctgtaatagaagttaatgtagcatctttaacaaattttgctgcttttggcttagcaagtcccattagaagcatttgctcaacattgctacttttcccactaaggaccttagagggatttatagtacttgttgctgttagttcttctgaaaggagattttcaaaagaactcccttggat

SEQ ID NO: 6958 - DNA, 200 bp, Lawsonia intracellularis
aggcttagatatttttttagtttcttcttgtcgttgtaattcattagcataattaatacggatactcatatcgcctccaaagcaatcttatatctaaaaatttaagcaaaaagcttgccaagagtaaagttaaaataacctagtgaaatataaattaataatgattaaaaagatacaggcaaaaaattccaacttatgat

SEQ ID NO: 6959 - DNA, 200 bp, Lawsonia intracellularis
ttttaatctgttaaaactagctttatacttgtttctttgctagaaagagactattttttaatgaagttagaagtaagtggaattttaatttttagcttagaggaattgatggataaataaggagaaaagagatgcctgtattaaataaaattgtttgtgcgattgatttatcggagcaaagtagaactattgctgactat

SEQ ID NO: 6960 - DNA, 200 bp, Lawsonia intracellularis
gctgtaatgcttgctaaaatgtctaatgcttctattatagttgtatatgtagctccaacacttactcaatatacaggatttcatatcccgccaaatactattgatagttttgttggtgaaattgtttctggtgctgaacaagctataaaaagttttgtggatacacattttcaaggagttaatgcacaaggaacagttgt

SEQ ID NO: 6961 - DNA, 200 bp, Lawsonia intracellularis
tgttggttatgcagctgaagaaatattatctttggctgagattgaaaaagcagatatgatagttatgggtacaagaggaagaaaagggcttgatcgtattttatttggatctgttgctgaaaaggttgtaaaaagttcaacatgtccagtacttacagtacatcctgtagaggaaagtgtatagaagtactaagctagta

SEQ ID NO: 6962 - DNA, 200 bp, Lawsonia intracellularis
tgtatctacagtttaactatttatctattacctttttttattaaaagaatatatttttttatgttgaagagtccatattgcaaatctatatttaattaaaaactttatatagtaggtttaatatatattttcattaaaattttctatagatatgataataaaaagcattttttatgtactatgagttatacttactgtta

SEQ ID NO: 6963 - DNA, 200 bp, Lawsonia intracellularis
tgaagttttactgtaatataagtatgataattatatattttatataataaatagatttattaaagatgtatgtattttcctataaaataataaaaataaaagtgtataattatcaataaaaagatgtacaaaatttagttaaagtttttaatttagtaatacataatgatataaagtataaagtcaatataaaaaataat

SEQ ID NO: 6964 - DNA, 200 bp, Lawsonia intracellularis
attgtatataaacaatatatatatatattcatttttgaataaattttactgttgattcatatatatatatataataagtaataagctttttattaaatctattacttaataaaagttctttttaattagttgttgaccttatagtgatatgataccacatagttctgctgctttttctttgactttattacttttaataa

SEQ ID NO: 6965 - DNA, 200 bp, Lawsonia intracellularis
taccttcacggagtatacttattgtattatttggatgtaactcaatgagtgttgatggtaatccgccagtagggataggaggtatatctataattccttctatatagggataaagtcttatatcaagttgagtaatttttgtaacaggaggatttttatttatatttgcactggtagctataataggttctccaacaaga

SEQ ID NO: 6966 - DNA, 200 bp, Lawsonia intracellularis
tctgcaatttcctttgcaataggatgtgaagaaagacgaacagcaactttttgtgtactagctgtaatatatggtgaaatattttttttagcattaagtacgatagaaagtgccccaggccagaagtgttgcagtaaaggatagataatttgaggaacttctgctgttatagtaagttgttcccagttacctataataag

SEQ ID NO: 6967 - DNA, 200 bp, Lawsonia intracellularis
tggaagaggcatattaatagcacgttgtttagctataaaaatttgttgtattgtatcctcattattaaaaattttgcatccaagtccaaagaatgtttctgtaggaaaaataataagtttcccttgattgatgaaatttacagcttcttttaaagaaattatttttaacatattaagaataagttgtaatttttttgact

SEQ ID NO: 6968 - DNA, 200 bp, Lawsonia intracellularis
aacctttttttgataagcattaacgacatttttttattaaaagaatatttttttatgttgaagagtccatattacttgaatgtgctataatataaaagcgatattacaatacttaagtaattaaggtagttacttgagtaaagtttataaaagtttccattataaaagttattaactgcaaaaagagatgtacataagtg

SEQ ID NO: 6969 - DNA, 200 bp, Lawsonia intracellularis
tattgtagtaaatgtgatgggggtacagctaaaaatatataaggtagaaagtgaatgtggctgtattatgtattatgtatttagtaagagaggtgtattcctaggaatacacctctcttactttttatagaatgagttaaaaaattaattaatagtaatagttgaaatgaaaggaaatatgttgtttcttttcaattttt

SEQ ID NO: 6970 - DNA, 200 bp, Lawsonia intracellularis
tttcttttttcaaaagaaagtatcccatctatatcaagagttaatgttggtgagagttgtacttcatatgataagccaccttctgcctttgtatattttttcttataactaggagccgaaatagtatatttaaatagaggcgttatcattgagtttgaactcaaactatttgtttgttttaaaccagagcttccaactat

SEQ ID NO: 6971 - DNA, 200 bp, Lawsonia intracellularis
ccatgtttgtagttgagaatattctgtcaattcccatttagttttcagaccaatacttttttctaaaaggttttccctattctcactaattttacaaacaacaggagattgttcttcagtgtatggactccatctaacattggagacaaggcatccaatatatggtgtaagtattaaagtttttattgcaggtatgttat

SEQ ID NO: 6972 - DNA, 200 bp, Lawsonia intracellularis
agccaagatggattaatccaccagttaaggttatgtcagggctgccttttgtaacaatatgcttctctccatgggtaacccgacgagaatttgtaactttcccccaactatagaaacctatcatagtacctgtaatcccttttttttcagggtttaaagtaaaaatagcagctaaaccatcagttgttgatttagacttc

SEQ ID NO: 6973 - DNA, 200 bp, Lawsonia intracellularis
acagaaccattactagaattaagttgtgttcctgaatattctttgtattcttttttgttaaagttataagctaagccaatattagttgtaggagagaagttaagcataatacctgcttgtgctgaacggagtttgttttctaagttagtggtatacttatttatagaagtaaatacagtgtaagatttagtaggctgtag

SEQ ID NO: 6974 - DNA, 200 bp, Lawsonia intracellularis
tgcctctataatattagtattttcaatagtagatttattgagggagccagaagtttttctattatttaagcaaagttgtaattttttatgtgtagtagtggagagatgtttactagagaagtgggcctttagagcaagagactttaaggtttctgagataaactcagaggtgtcagatagagcaaattgtaaactttgta

SEQ ID NO: 6975 - DNA, 200 bp, Lawsonia intracellularis
aagaactaaattgtccttcaggtaagagttctgcgattaaggagttagtggagggatgtttttttgtaagcagttgtgtttgcctagtttgttgtcttctagctcttcttccattccctgggagtggagtaggctgtgcaggagtttgtgcaacaattggatgttgaggagtattttgtcctaatgggcttgtccctgta

SEQ ID NO: 6976 - DNA, 200 bp, Lawsonia intracellularis
ttatttgtacattgaggttgttgttgttgttgagcttgagattgttcactttctcttacagctacttggatttcttcattttcaccaacatttttttgggggtcttcgttatcttcttccccttctcctagggggctattatagatatcaagagtttctaatgtttcagttgtaatactagtaacatctcctataatatt

SEQ ID NO: 6977 - DNA, 200 bp, Lawsonia intracellularis
aggaagataggtatgtggttttttaggtctaggactctccagatctaaattattaccacagaaaactcctgggatatacattggtccagaatcttctttagtattatcatcatctgagaattcatctggtggacttaatggacagttttttaatgcttcttttttgtctttatggtcttgattgataaagccagaaggtg

SEQ ID NO: 6978 - DNA, 200 bp, Lawsonia intracellularis
gttgtataggtgtggtgtcagatgtactagttgttcttccttcagaaagcagagaatctccaacaagtgtaccgagtccaggtttcttttttttctttggttttttctttggagtatctggaatttttagttcttcaaattcaggtctatttagggttggatagggaatggtagaatcttcattactagtagaagttttt

SEQ ID NO: 6979 - DNA, 200 bp, Lawsonia intracellularis
tcttcttcacaacaagttgggatggaacttgaggggtttttaggtgtatgtttcagatgctttttcttttctttttttttccttgggatatctggagtgcattcattttctatagcctcttttgttttaagaggcatagcattagattgctgagaggttgattctatagatggcgagggactatttgcatgtatagaaag

SEQ ID NO: 6980 - DNA, 200 bp, Lawsonia intracellularis
tagtgattggttgctagatagcgttgaagtctgtgtttgtttctttttctgtttatgatgagagctagaagaaggttgttgtttgtcccctgtagcaacaagagttttagcttctaatggcatttgtactgttgtttgttcagagcttatagaggttgtagttataacttcttctgatggaatgtttgctgaaaatgtat

SEQ ID NO: 6981 - DNA, 200 bp, Lawsonia intracellularis
gtgttttaacaggacttgtttttttctcttttttcttttttttagtgctattagagctagaagaagattgttgctcagatgaatgtggtggttcgatatctgtctctaaaagtgaagaagacttgtctaatgtagctattagattctttttttttgttttttcctttgtatttgtggtttgaattccttgttggtttatt

SEQ ID NO: 6982 - DNA, 200 bp, Lawsonia intracellularis
ctaactgttgttttagatgtttcacttcttctatcatcttttttttctaatatgataaattgtatattgttgccatcttcacttttgggggagggaggaattttttctttcagaagttgagttattgcttttacctcttgtaatctatatgcaagtccactggttggtggtaattgagacagtttttcttctgagaaatt

SEQ ID NO: 6983 - DNA, 200 bp, Lawsonia intracellularis
tttagtagccattagtacatctgtttgcagagtaactaggtattgatatttttgttgtaatgttggatcaacttgttttccttctttaatttgttgtcttatttggtcttccagcgtgcgtcttttgctttctacaggttcaaaaatattttttaatgtagttaaatcaagttgacttagttgatcaacaggtaagctta

SEQ ID NO: 6984 - DNA, 200 bp, Lawsonia intracellularis
gtagatcaaaatttatttgttcgggtgtagaggtagagcaggatatatttttctttagcatttctaataagtcttgaacgttttcatgtcttttcattacttgtttgatttgttgttgttcttcttcttcttctttttctttaataaactttgcaagttctacttgttgttcaagcatgctacgatatttttctgttaat

SEQ ID NO: 6985 - DNA, 200 bp, Lawsonia intracellularis
tctttatcagcctgcccttctctatgtaaatctttaatggtttgtagtagtatatgtagggtactttgtccttcctcatagattgctttaattttttgtaatccaagattttctagtaattgcagattaagagagaatacagatcttttagaagctgtcactagagtttggggtttatctaagggagctttgtttttccc

SEQ ID NO: 6986 - DNA, 200 bp, Lawsonia intracellularis
ctgtttagttgatggaattttaggtcgtacaacaggttcttctaggtttgaagttgttattatagagcttgaagctgattgagtagactgtggtatactactagtttctatagagcttgaggttctagtggtaagcgtttcagttgatgacactggagcgtattttctcttagagcctaatggtgaagttaactgtgcag

SEQ ID NO: 6987 - DNA, 200 bp, Lawsonia intracellularis
ccgtttgtaatttattactgctttctgcacctgatagtcctagttgtgccagttgtctaattgttatcggttgttgaactagtgtttttaataattcaagctcactttgatttacctgagtatagctaccaaatattaatggttctctgagttgtggatgtattatagtgcagttaataataattgatttttgacttgga

SEQ ID NO: 6988 - DNA, 200 bp, Lawsonia intracellularis
tttttagttttttgactttcttttatagctgtaacgttaatatcaagctctgtctgttcatcatcaaggtagcagtgaagtttttttggtactaatcccttgagaaagtttgaaatatttggagtagaagcctccttatcattcatatcactatttttatccatagcaaaagttatagttactttaatacacactataga

SEQ ID NO: 6989 - DNA, 200 bp, Lawsonia intracellularis
aaaaagtagtatcagaatacatggtatactttttatattaatttttgttaaatatttagagttattatttatattattaatatattttactaatctatatctatttaaaaattttattatatataatagtttaatataatttattagacttagtacacatgtattattcattataaaattcctgtaaatataaatagtag

SEQ ID NO: 6990 - DNA, 200 bp, Lawsonia intracellularis
aaggttgtttgttttatataaaaacaataatttttctcttaatagagaatattttattataaaacttcattttagaatgaagttttataatatttaactatataataaaaaattatataactaaatattcataagttacagtaattatgcaaagctattgcaatagtatttgtaaatagtatgactatataatagtcaaa

SEQ ID NO: 6991 - DNA, 200 bp, Lawsonia intracellularis
aaagcagtataatatttagccaagatttttaactacggtgatatataaggggaaaatataaaaagtcaaggtaagaaaagaagattagacgtaggttgaatatagctatttgtgaatattacatttttataaataaaatttttatagaatttttaacagccagtagttgtaacttatttctaatcttattcttattatat

SEQ ID NO: 6992 - DNA, 200 bp, Lawsonia intracellularis
ttttttaataaaagagattaagttataaatttttatgtttatagcgttttttatgtatgaagtaacgttttacattaaactaagtagtaaatatgaagtttttgtgtattttattactagctgtaatagtctttctatataagacttgcagttttttacaggttgtgaaaagaagcctagtaacttatatattagttata

SEQ ID NO: 6993 - DNA, 200 bp, Lawsonia intracellularis
atatataaagtgagaagtttttacttagcattaattatggtagtagtgcattataccagaagtaatacaataaaagatagacaatctaagagatttctgtttgtataggcagcttttttagtcctaagaaagataaaaaatataagtaactactagtaaaaaaattgtggtattatattcttgttgttaaaggtgttata

SEQ ID NO: 6994 - DNA, 200 bp, Lawsonia intracellularis
tccaatactaaagtatattgttgtaaaggtaatataagttttgtgagctataaagtatgtagtttcttttaaagaaattgtatttaatcttgctaaatgagagtaatctcctatttgttagtttcttgtgctgagtataattatgtcttcaaaatcattacgattaattgttgtaggtcggttacgtatacctttttgga

SEQ ID NO: 6995 - DNA, 200 bp, Lawsonia intracellularis
gagcagctgcagaacattattataaacgtatttcttgttggagagcaatttatgaaactatcattaaagatggaaactcttcattatctgtttctcaacgcaaagcaatggaaggaaaaaatatacttgcagcccttgaacctatagatatacctatttgtttagatgaaaaaggtaaatctatctcttcacaagagttt

SEQ ID NO: 6996 - DNA, 200 bp, Lawsonia intracellularis
gcaaattttcttagaaattattttgaaaatacaacaaagcgaccatgttttattattggtggtgcctttggtcttgatagtagtgtatgtaacattgctaatgactgtttatcgttagggaatataacattcccacatgaactagcaagagttatatttcttgaacaggtttatcgtgcagagactttattacgtaatat

SEQ ID NO: 6997 - DNA, 200 bp, Lawsonia intracellularis
accttatcatcattagtactagagaatgtataggtatcttttttgaattgaagaggggaataaaattgtttgttactaataattagttttaatatagtattgttatgaagatacatagtagtgcatggatcattattggagctttaggcctatggtttggtgtagaaaatcctatatgttatatcccaggtcttattttt

SEQ ID NO: 6998 - DNA, 200 bp, Lawsonia intracellularis
ttctatcctttatctttaattatattaggacataatgcaccaggaaaagttgatgcattaagagctggctggattctaggattactaggatcatctttaagtctttattggctagctgttcccatacatactataggtggtttaccatggttgcttgcttgcccttgtgttgtccttgttggtggttctttaggattttt

SEQ ID NO: 6999 - DNA, 200 bp, Lawsonia intracellularis
ttctggtttgttttcattctttgttttttgttttcatcatatacaattttggcagaaaagcttaatgctaggattggtatggtatttaattgagtggataaaaagttggttttttacagggttcccttggcttccttttacaatgggatttgcacgatatcctgttatgttacaatgtgcatctattattggttcatatg

SEQ ID NO: 7000 - DNA, 200 bp, Lawsonia intracellularis
ctttgagtggactatatgtagctattctttgtttagttttctatagtattctctattctcagtccaaagatattcataagtgtagtattaagtggcccttaataagggctctatctgtagcctgtattctttttataagtattgtactttttggatacataactttaaagacaaatcccattgatatgaatatacaagat

SEQ ID NO: 7001 - DNA, 200 bp, Lawsonia intracellularis
ggagttactatagctattatacaggggaatgatgatcagattgttaaatggaatcctcaaacaaaatatcgatctgctcaaaaatatgttagggctagtgaggagttgttaaaaaatatttttcgacttcatgaaggtgggaatacatattatcctgacgtttttttgtggcctgaaacagtcattttatttgattttaa

SEQ ID NO: 7002 - DNA, 200 bp, Lawsonia intracellularis
agctgaagttgaaaaaggcatacataatcctttaacatattttgtaaataaatatcagattcctgttatttttggagcacctggaatagaaacagcagggaaagacataactatttttaatagattatattattatagtccaggtaactatagattagattgcagtgaatcaaataaaataaataaatctcttcagtggt

SEQ ID NO: 7003 - DNA, 200 bp, Lawsonia intracellularis
atgataaagagcatttagtcccatttggagaatatacacctctttttttcaattttccttttttaagtcaactattgcaggaggtaggtacatatactccaggtgaaaaggtggctccacttctttttgaaataaaagaaacagtaaagaaaggaagtatagcatgctatagaactatttcaatgggtatacttatttgt

SEQ ID NO: 7004 - DNA, 200 bp, Lawsonia intracellularis
tatgaggtaattttccctgagttagcaagaaagcgtgtagctgagggggcacaagtatttattactgtaagcaatgattcatggtttggccatactattgcaccagttcagcatttacaaattgcccagatgcgatcaatagagtttggacggtggatggctcgagctgctgtaacagggatatctgcttttatagatcc

SEQ ID NO: 7005 - DNA, 200 bp, Lawsonia intracellularis
ttatggccgtattatagattcaacaaaaatttttatccctacataccttgttggaactataagacctattatagataatacggtcttcttttggatagagccatggcttccaacttttgctatcttagtattatgtattatgttgtggaaaaataacttaataacccattcttgtggacataaaagtagagggtgttcat

SEQ ID NO: 7006 - DNA, 200 bp, Lawsonia intracellularis
gattcagtttcctgagttaaaggcatgtatcctatctttatcagagcagtttgaaattttttggaggcgtctttgaccaaccatcttataaaaatcgtctttctgaaatagagaaaattctttcagcaccagatgcatggagtaacccagaagcattaacgcctatacttaaagagaagagtcaacttgaagcagataat

SEQ ID NO: 7007 - DNA, 200 bp, Lawsonia intracellularis
cttcgatttgaaaaattacatctttgtcatacagaaatgatagactggtttgagcttgttcaagaatttttaacaactaatgagtccagtactgaatttttagaagcattaactgcactagaattacaggtaaaaaaatttcaagatgctatggaagaagcagagatgtatcttcttcttggagcagaagaagataaaat

SEQ ID NO: 7008 - DNA, 200 bp, Lawsonia intracellularis
ggatgctatattagaaattcatcctggagctggaggtacagaagctcaggattgggcagaaatgttagagcgtatgtatttacgctgggcagatttacatggtttttctaaagaagagatggattacctccctggtgatgaggctggtattaaatcagtaacattgagaatttctggtgagaatgcttatgggttgctta

SEQ ID NO: 7009 - DNA, 200 bp, Lawsonia intracellularis
aaggagaaagaggaatacataggcttattcgcatttctccatttgactcgtctggaaggcgtcatacgtcttttgcatctgttgacgttattcctgacgcaggtgaagaagttgttatagatataaaagattctgatttacgtattgatgtttttcgctcaagtggtcctggaggacagagcgtaaatacaacaagttct

SEQ ID NO: 7010 - DNA, 200 bp, Lawsonia intracellularis
gctgttcgtataacacatatccccacaggaattgttgctcaatgtcaaaatgaaaagtcacaacaccataataaagagtctgcaatgcgtattcttagagctaggctttatgagcaagaaattaaattacgtgatgctgcaaaacaagctcaatatatggggaaagaagcaattagctttggaagccaaatacgtacata

SEQ ID NO: 7011 - DNA, 200 bp, Lawsonia intracellularis
tacaatgcagccttataggctagtcaaagatcatagaacaaactgtgagtctagtgatgttgaggctgttttaggtggacagattgataaatttattaactcttatttattatcaacatatagaaataatagcttataagaaatattagtagttatgataacttttataaatgaatagataagtataatctttgaaatat

SEQ ID NO: 7012 - DNA, 200 bp, Lawsonia intracellularis
gatgaactaaattttaataaataatatgttattaagatagaaagtgttgaagtattttttaaaactgtaaataagtgtaaatattatttatagttagttacataacaaatgtatattcattctatttatagaatagtattctttatttaaaagtagatatactaaaactaaaaatagtatatagttattttaaaagtaga

SEQ ID NO: 7013 - DNA, 200 bp, Lawsonia intracellularis
attaaattatgtcatgattttttgataatataatagaaataatagagtaaattatggtgataatgtgatacaataaattcttatgatagataatatgataatttgatatcttgatttatggtggagtatagattatattgctgtttctcttacacatgtaaagattccttatggagttgccatgaacaaaagtgaacttg

SEQ ID NO: 7014 - DNA, 200 bp, Lawsonia intracellularis
tgaagtctttatctgaacaggcaaatatttctttagatgaagctacattggttgttaatacgtttgtagatagcatgaaagaatctcttctcaaaggtggtcgagttgaggttcgtggatttggtagttttaaagtaaaagagtatgaaggatatgctggccgtaatcctcgtacaggcgaaaaggttgttgtacaacca

SEQ ID NO: 7015 - DNA, 200 bp, Lawsonia intracellularis
aaacgtcttccattttttcgtgcaggtaaagagctgaaggaatatcttaatagctagatttacctctttgttagtaaatataatttttctttattatagtataattcttttctagagggagtaaaaatttttaataaagatatttattaaactattattaaataactggctatagaattatattatattctatacttaat

SEQ ID NO: 7016 - DNA, 200 bp, Lawsonia intracellularis
taagactacttaaaagagaactatcttttagtagtcttttttattagttattgattatgccaaattgattaactatgctataattgtatgctatctaactattttttacttttatttatataataaccttacattataattaatgattgtaactaagagcaataattaatattggaaaattactatgtttagcagagaag

SEQ ID NO: 7017 - DNA, 200 bp, Lawsonia intracellularis
atatacctagtatagaattttttaaacttcatggttgtggaaatgattttgtttttattgacaatagatctctttttattcctaaagaaaaaatgtctagttgggcagaggtaatttgtagacgtaagagaggcgttggagctgacggtattgcattttttgagctatctacaatagctggtgctgattatatgtggcat

SEQ ID NO: 7018 - DNA, 200 bp, Lawsonia intracellularis
ttttttaactctgatggttcaagagctgaaatgtgtgggaatgctagtcgttgtatgggggtattagctgttaagataggtcttgctaatatgcagcatacattaagtacggatgctgggttaataagtattactgttggtgatgagttacaggatgcaactgtaactatgacagatccaacaaatattttgttgaatgt

SEQ ID NO: 7019 - DNA, 200 bp, Lawsonia intracellularis
atctctagaagtagaaaaagaaacacaacaagtacattttgttaacacaggggtaccacatcttgttgtatttcatgataatcttattgattatgatattatacctaaaggaaagttattacgaggacactctcatttttctcctgagggagtaaatgtaaattttgttaagattgaaagtccaaattctatgtttgtaa

SEQ ID NO: 7020 - DNA, 200 bp, Lawsonia intracellularis
gaacttatgagcgtggtgtggaagatgaaactctagcttgtggtacaggtgtatgtgcatctgttattattgcaaatcaacttgggttagttggaactaacgtcaaagtcatgacggcaagtaaagagataatagagcttaatttgaataatggaaaagtattaatgaaaggacctgttgttcatgtttacacaggacaa

SEQ ID NO: 7021 - DNA, 200 bp, Lawsonia intracellularis
ctgcaattgtcagagctaggtcttttttgacaataaaaaataaaaaaattattattttggtaggttatatcttttaatggagtatgttatggggcaaatacaatttcaaggagcaatcacagcactagtcacaccttttaaaaaaggagagatagatcttgagtgttatcgagaaatcattgaatggcagattgagcaag

SEQ ID NO: 7022 - DNA, 200 bp, Lawsonia intracellularis
gtattaatggattagtttcttgtggtactacaggagaaagtgcaacattaacatatgaggaatataagttattaattaaagcatgtgttgaacaaacaaaaagccgcgtccctgtaattgcaggtgctggttcgaatgatacagctaaagcaattcagcttacaaaaattgcaaaagagttaggggcggatggagtatta

SEQ ID NO: 7023 - DNA, 200 bp, Lawsonia intracellularis
catgttactccatattataataaaccaactcaagagggtttattccaacattttaagacaatagcaagtcaggaatctattcctatcttattatacaatgtcccagggcgtactggttgtaacttactgcctgaaacagttgcacgtattgtccaagatataccagaagttgttggcataaaagatgctacaggaaattt

SEQ ID NO: 7024 - DNA, 200 bp, Lawsonia intracellularis
agaacaattttctgaaattattgaattttgtcctattgggttccaagtattaactggtgatgattttactatattaccatctatgatcctaggaggatgtggcgttatttctgtaatatctaatattgttccagctatggttgttgagctatgttcattaattgaaaaaaataaattagaggaagcacgtcaaatccatt

SEQ ID NO: 7025 - DNA, 200 bp, Lawsonia intracellularis
ataatttagcgccactatgtaggttaatgtttgttgaaacaaatcctatccctgtaaaaacggctctttctttaatggagaagttagagcttgaatttaggttacctttaacagagcttagccctataaattttactaagctagagtctacactaaaaaatatagggattataagtaaatagtaatctttctttgtagat

SEQ ID NO: 7026 - DNA, 200 bp, Lawsonia intracellularis
aagtatagttaaagtaaaataaatagattagatttggatgttagttgagttcttagtataagaaactaactatatctaatagcaaattataataatgtactattagtaactaatgttgttttatgagattattaatctatactatttattataataaatgatactttattaactaacttatttatgttatatattaaaaa

SEQ ID NO: 7027 - DNA, 200 bp, Lawsonia intracellularis
aagtcttatagcattatcttttggtacccttggactgggtattgcagaatttataataataggcatattaccttatattgctactgattttggtataactatacctactgcaggacatctcatttcagcatatgcttctggtgtatttattggtgctccttttttaatatttgttcgtcgttatcccctaaaaaatattc

SEQ ID NO: 7028 - DNA, 200 bp, Lawsonia intracellularis
tattggctttaatagttattattatgttaggcaacctgatagcatccattgcttttaactatgagacaatgatgttagctcgttttatttctggacttcctcatggatcctattttggagttggttctattattgctgagaagttatcagataagggaaaatctacagaagctatttctataatgatatctgggatgacg

SEQ ID NO: 7029 - DNA, 200 bp, Lawsonia intracellularis
gttgctaacttatttggtgtcccattaggaacattcttaggtgttacgctctcttggagaataggttttttgattgttgttggctggggactagtcacatttttttatgtatggcgatgggttcctcagatagagaatgtaccagatacaggccttaaaggacaattttattttcttaaaagacttgcaccttggttact

SEQ ID NO: 7030 - DNA, 200 bp, Lawsonia intracellularis
aattattgctactatattaggtaatggagctgttttttgttggtatagttatattataccattattaacaaatgtatcaggtttttctcctcatagcgcaacattgcttattgtttttgcaggtgtggggatggtaataggtaatttttttggtggagtattgtctgatcgtttgatgccaattcgtatagcaattttta

SEQ ID NO: 7031 - DNA, 200 bp, Lawsonia intracellularis
tacaagggttgctcagtattgtccttatttgtatcttttttttctcttatatcccatgggtttccatcttattgatgatattaggtactgcttgtttatttgctttaagtagtccacaacagttattattaattaagttttccaaaggcggagaattgttaggaacatcaagtgcacaaatggcttttaacttggggaat

SEQ ID NO: 7032 - DNA, 200 bp, Lawsonia intracellularis
gctattggggcatattgtggtgggttacctattcaaatggggttaggatatcagtattcagcattagttggtgttccattttcagtaataggttgttttatattatatttcttttaccaaaaatttggtatgataaaagtaaattgagtaatgagtattctgagttattaatagtatcttcttattaattattactatat

SEQ ID NO: 7033 - DNA, 200 bp, Lawsonia intracellularis
tagtagtattgggacattaataagaaagataggataagtagagctataattataattaaaaatgtatttttgtaattctatatatgtctaaaaaatctgtaattagacctaatcctgaagatttaaagttgcccttaattggtgcagattctcatgcacatttagtgtttcctgagttatttactagactctctgaagtt

SEQ ID NO: 7034 - DNA, 200 bp, Lawsonia intracellularis
attaagagagcagcctctgcaggtgttgcttttttagggaacgtttttttaagtattcaagagtatcaagagtataatgaagttttaaaaactattcctggaatattttttcttttaggcattcacccttgtgatgctatgaagtttaataaaaatatccttaaaattatgtatgatctctttcgttgtgatgaacaatt

SEQ ID NO: 7035 - DNA, 200 bp, Lawsonia intracellularis
aaaagcagttggtgagatagggttagatttttatcataaagattgtactgctactctccaagaagaagtttttagagctcagcttaactttgcaagagagatgagaaaacccatagtaatacattcacgtgatgctgcaagggatacgattaggattcttgagtctgaaggatgtatagcttaccctgtactttggcatt

SEQ ID NO: 7036 - DNA, 200 bp, Lawsonia intracellularis
gctttagtggtgatgcagtatcttttctagatagaattttaagtaatggttggaatatttctgttgcagggcctgttacatatcctgggaacaaagaactacaagaagtaatccctatgattccagaagacaagttattaattgaaacagattgtccatacctttctccagttccatggagaggaaagtgcaatgaacca

SEQ ID NO: 7037 - DNA, 200 bp, Lawsonia intracellularis
gctttggttgtttttactgcagcatatatagcttctttaaagaagatagatattatagaactttggacacaatgcggagaaaatactaaaaaattttttatgttatcataacttaagcgtatcattactctattgttacttatacatgtttattaattccactgaaaaaagaagtttgtcctcccgagaaatccataata

SEQ ID NO: 7038 - DNA, 200 bp, Lawsonia intracellularis
gaactaatgccccctcctccagagcctgaataccatgccatcatagattcaacttgaacacgttgtctaatagcattaacatcaattcgttgttgttttcgtgattcttcaacattgttaagagcttgtattttttcaaattgtttaacaagatcagggttgtcttcaaaaaatttttctactttttctttctctggtga

SEQ ID NO: 7039 - DNA, 200 bp, Lawsonia intracellularis
gtctgcaataacttttattcctccttcatctcctgaaacaagttgaaatttaacattttcatctaatcctgcttcttttaatccttcttttactttagtatcaaattcattttggagttgatctctgtaagaaataatagttgaaaaagatattttatcagtaggcccaagtcccataccatccatggtggcacttacag

SEQ ID NO: 7040 - DNA, 200 bp, Lawsonia intracellularis
cttgttgtaaccaacttataggattacttgaaagatagttgttgtttttttgtgttctttgagaattattttttactgcttctgtattttttgtctcagtatttgaatgtaggttttcagtagatgattttttttcataattagttgaaacgtaactatttttgagtggtgtaatagacatatttaattccttattgtaa

SEQ ID NO: 7041 - DNA, 200 bp, Lawsonia intracellularis
ataaatattttttgtatttataatgcaatattcatactattaatgtataatgcttttgtttatgattatgttagtgataaagaatagtttaagaaattagtaatattgtagagatagttaaatttttattgtgtgttatttaaataacgatataataaagtttaatattcaacatagtagtagaataagaaatatgaaga

SEQ ID NO: 7042 - DNA, 200 bp, Lawsonia intracellularis
attttaaatagtaagaagaaaggattaaaaaattaatatggctgtaattttgttaggtaatgaacatatatggaagttacctttttgtcgtttagaatttgttgctattcttgagaaaatgttatcttttgcaaagttacaaacaatagaagtttatttagtatcagatacaacaattgcgttttttaatcttcattata

SEQ ID NO: 7043 - DNA, 200 bp, Lawsonia intracellularis
tgaattgtttagggataacaaacgtcctttcttttcccatggatgacgaagatcttgctggaagtattattttatctgttgatgctgtttgtcgagaatcattattatatcgtcagcctattttagattattgtttatcattattatctcatggaattgcacatattgctggatatactcatggagtagagatggataaa

SEQ ID NO: 7044 - DNA, 200 bp, Lawsonia intracellularis
ttttgtagtaacttattattaccttttaagttagcttaggtatgctagcagaaatgtaacgtaagttattatacctcctcattttctcttgctatttttttgtatatgtagtattaattattgtatagtgagtgatgttttttattttttgataataacttgttatatttttttatataatttaattgttaaatatatcc

SEQ ID NO: 7045 - DNA, 200 bp, Lawsonia intracellularis
ataatagtatcattttactaggatataagggttgtccaaggaggacatgcagatggctgaagttatatacaaaggaaaaaacttcgaagtcgatgaagatggttttttattaaattttgaaaattggggcccagagtgggttgattatgtaaaagaatctgagggtattagtgaagtaacagatgctcatagaaagatta

SEQ ID NO: 7046 - DNA, 200 bp, Lawsonia intracellularis
tagaatttttgcaagattattataaaaaaaatggaattgcacctatggtgagaattatttctaaaaatactggttataaacttaaagaaatttatgaatttttcccatcaggtcctgggaagggcgcttgtagaatggctggattaccaaagccaacaggctgtgtttaactaattttattcatatattataaataatgt

SEQ ID NO: 7047 - DNA, 200 bp, Lawsonia intracellularis
taaatctattatgattttttatttttatgcattaactatattgtaataattttactaataattagattatttttatttttttcaaaaaatatacttttcaaaatacaacattttaggttagttatcttatcagcataaaataatgtactatgaaaataatacaattagaataaataatgattattaattttataataaaa

SEQ ID NO: 7048 - DNA, 200 bp, Lawsonia intracellularis
aatacttaatgaacttctttaccttatttgttatggaccggtatactagaggccaggactaaaacaaaatagtctttgttagggaagggattgtacctgagaaagggaggcgtacatgaaaattatccattctgcaatttttgctgttacattattaacagcatggtcaacagtttgctttgctgcagaagttacagcta

SEQ ID NO: 7049 - DNA, 200 bp, Lawsonia intracellularis
gttgtactaaacgtgttgaaagctataattatcttgtggattattcaggctctatgatgatgaaacatgttgctgttagagagcctaaaatagaattagcaaaagaagctatattaaaaattaatgcggcaatgcctaaaatgtcatatcaaggtggattatatacttttgcaccttattctgtaattattccccaaggt

SEQ ID NO: 7050 - DNA, 200 bp, Lawsonia intracellularis
tcttggaattcatgtgttgccgaatgtgcggttaatacaattaagtctgatttagaaatttttggtcgtcttactcctatgggagacggcataaaaatgcatgaaacagtcattaatcaaatgccccctcaggcagccgttattcttctcactgatggtcataataatttagggatgaatcctgttgaggaagtaaaatc

SEQ ID NO: 7051 - DNA, 200 bp, Lawsonia intracellularis
tatatatcaaacaaatcctaatgtttgttttcatgtagtttcatttgcagatgatgctgaaggcaaagcaataattgatcaaattgttgcacttaatagtggaagtgttcttgttgatggtttacagcttctacaaaatcctgctgtttgccaagaatttgttaatagtgttttttgtcaagagcaaattcttgttacag

SEQ ID NO: 7052 - DNA, 200 bp, Lawsonia intracellularis
aagaagttgttgtacttcgtggtgtaaactttgcttttgattcttttgcattagatgatactgctaaagctattttagaagaaacagttcgtcttatcagagcaaatccagattttaatgttcgtttgcttgggtggacagatagtactggtcctgatgcatataacttgcgtttatcacaagaacgtgctgatgcagtt

SEQ ID NO: 7053 - DNA, 200 bp, Lawsonia intracellularis
aaaaacttcttggttaaaatgggtataccttcaaatcgtttatttgctaaaggaatgggtaaatcctatcagtataataatgctacaaaagaaggacgatatatgaatcgtcgtacagaacttgtcttttttgattagtatataaaaattaattactaaataagaagggcttggattcaagccctttttttgtgaagggg

SEQ ID NO: 7054 - DNA, 200 bp, Lawsonia intracellularis
ttttatatgaaaaaattttttttctttttagttatgcttataccttttttaagtataattcctcaggtagaagtgttagctaaagttaatatacaatcagaacaagaggtaaaagaaaaattagaacattttgcaaaagaatatctatgtcaagctaataaaaatttaaaatgtaatagagatgcaaaatttattactaa

SEQ ID NO: 7055 - DNA, 200 bp, Lawsonia intracellularis
agttggggatgaatttatagctaaattccatgaagttgacatagatagcctttcaatagagttatatcctagttcttcttcaaaaagtatattgtatgttggctatgtgatatatatagagaaatgttatgagtgtagggcaaaaacaaaagttgaagctgaacaagggaactttaaagttacagcaggaagaagagttc

SEQ ID NO: 7056 - DNA, 200 bp, Lawsonia intracellularis
gtgagttagcaagatttacaaatgggaaatggataatatagttttgctatttatatgaaatgaatatttagatatatctaatataaagcaaaagaaggtatgcaaggcataccttcttttgctttatattagatatatctaaaactaagaatctatctctattaaaacaggacgttcttcaagttcttcaagaaatttgt

SEQ ID NO: 7057 - DNA, 200 bp, Lawsonia intracellularis
ttggacgttctttttgttcaggaacaacaatatctaactccatatattccctataacctgtccctgcaggaataagtcgaccaacaataacgttttcttttagtcctctcaggtaatccatttttccttttagagaagcttctgtaagaacttttgtcgtttcttggaatgaagctgctgaaataaatgatgaagttgtt

SEQ ID NO: 7058 - DNA, 200 bp, Lawsonia intracellularis
agtgaggcttgagtaattcctaataccaatggttctgctgtagcgggttctaatccttcttccacaattttttggttttcttctttaaagtcacctttatctacttgttctccaacaaggaacgttgttcctccaggatttgttacagtgattttacgtaacatttgtcgaacaatgacttcaatatgtttatcgtcaat

SEQ ID NO: 7059 - DNA, 200 bp, Lawsonia intracellularis
tcctacaccttgaaagcggtaaacttcttgaatttcatcaacaagatatgcagcaagatacttttcacctcttgttttaaggatatcatgaagttcaggatgtccttctgttaagagatctcctgcttcaacaaagtcaccatcagaaacgttaatgtgtttaccttttggaataagatattctttaggatcacctattt

SEQ ID NO: 7060 - DNA, 200 bp, Lawsonia intracellularis
caggagtaacaataagtttacgttttcctttggattcacctgcataagtaactatacctgcaatttcggaaacaacagccatatcttttggtttacggacttcaaacaattcagcaactcgaggaagcccgccaacaatatcacgtgtttttgaagtttcacgaggtttacgagctataatgtccccagcttgtacttct

SEQ ID NO: 7061 - DNA, 200 bp, Lawsonia intracellularis
tgaccatctttgaccattataatagctcctgcagggagactatatattgcaggtgttgtacttgtgatacgttgttttgtttggccttctgcatcacatattgatattgaaggacggaagctagtagttctgtattcaattattgtcatggatgattgatgagtagcttcatcaagtttttcttggtatgttttcccatc

SEQ ID NO: 7062 - DNA, 200 bp, Lawsonia intracellularis
aataagatcggtaaatttgataaatccatttacttcagagacaaaaggttcgttaaaaggatcccattctgcaagaaaagtaccttttgtgacttcttgtccttcttttacataaagtctagctccattaggtaaagaatatctttctctttctcgtccttgttcatctacgatagaaagttgaccacttttacctatta

SEQ ID NO: 7063 - DNA, 200 bp, Lawsonia intracellularis
caagatggacgccatcacgattttcaactgacttaacacgagtaagaacaattcttccagaatgaagagcttcaaaattagagcgttcaatttcgcgtgaggcagttccaccaatatggaaagtacgcatggtaagttgtgtcccaggttcaccaatagattgagctgcaattataccaacagtttcacctatgttgaca

SEQ ID NO: 7064 - DNA, 200 bp, Lawsonia intracellularis
agatggccacgagcaagatcacgtccataacataatgcacataccccacgttcagactgacaagttaatgcagatctaatagtgacagaagcaataccaatttcttcaagttttttaacaacatattcgtctataagagtattttcagggaagatgatttcattagtaacaggatgatagataggatagagaagaactcg

SEQ ID NO: 7065 - DNA, 200 bp, Lawsonia intracellularis
gcctagaattctttcactaaggttttgtttgatttctccaccatcttgaacttgtttaacttcaataccatctacagtcccacagtcatttttataaacaataacatcttggacaacatctacaagacgacgagtaagatatccagagttagcagtttttagagcagtgtctgcaagaccttttcgggcaccatgtgtag

SEQ ID NO: 7066 - DNA, 200 bp, Lawsonia intracellularis
atgtaaaatattggagtaccgttaatccttcacggaagttagaagtgattggtgtttcaataatttcacctgaaggtttagccattaacccacgcattcctgctaactgtcgcatttgatcctggtttcctcgagcaccagagttggacatcataaaaataggattaaagctttggttgacttctgttctttctgtcttt

SEQ ID NO: 7067 - DNA, 200 bp, Lawsonia intracellularis
ggatctttaacaacttctgtagaaatttctttggtcatttctgaagaaatatcttgtgtagctttagtccaaacgtcaacaactttattatatttttctgtacgggtgataataccatcacggtattgacgttcaatatcgtcaacttcagaagtagctgtatcaatgattgtttttttggtagcaggaataatgagatc

SEQ ID NO: 7068 - DNA, 200 bp, Lawsonia intracellularis
tttcacaccaattgtgatgcctgctcttgtagcatattcatatccaatgtcttttaggcggtcacagagaataacagttgctttgattccagcatcacgataagcatttccaacaagagtagcaatattttttttagtaagaacacaattaacgtattcgaatttaagccctttgggcagaccttcccaaacaagaatac

SEQ ID NO: 7069 - DNA, 200 bp, Lawsonia intracellularis
gtcctgctgtagtattatatatattcccatcttccatgcggactttaatttttgcatggatgttgacttggttattatcaatagctgaaataacttcccatggggcacagaaaaccattccttcacctttttcaaaagagcgttctacagtcatataataaagacctagaacaatatcttgtgatggtacaataacaggt

SEQ ID NO: 7070 - DNA, 200 bp, Lawsonia intracellularis
gagccatttgcaggagagagaatattgtttgtactcatcataagcacacgacactctacctgtgcttctactgataaaggtatatgtacagccatttggtcgccatcaaagtctgcattatatgctgcacaaacaagaggatggagttgaattgcttttccttcaacaaggagaggttcaaaggcttgaattcctagcct

SEQ ID NO: 7071 - DNA, 200 bp, Lawsonia intracellularis
gtgaagggtaggggcacgattaagtagtattgggtattcacgaacaacatcagaaaggatatcccatacaacaagttcttcacgttcaacaatttttttggcacttttgatagtagatgcatgccctcttttttcaagttcagagtaaataaaaggtttaaacagttctagtgccatttttttaggtaatccacattgat

SEQ ID NO: 7072 - DNA, 200 bp, Lawsonia intracellularis
gtagttttaacttgggacctacaacaatgactgaacgtccagaataatctactcgtttaccaagtaagttttgacggaatcgaccttgttttcctttaatcatgtcagagagtgattttaaaggtcgaccatttgtgcctgcaatagcacgtccacgacgtccgttatcaaaaagagcgtcaacggcttcttgaagcatt

SEQ ID NO: 7073 - DNA, 200 bp, Lawsonia intracellularis
cgtttttcattacgaataataatttctggagcaccaagctccataagtcgttttaaacgattatttctattaataactctacgatatagatcgtttaagtcagatgttgcaaaacgtcctccatcaagaggaacaaggggacgtaattctggtggaataacaggtataacctccataatcatccattcaggtcggtttcc

SEQ ID NO: 7074 - DNA, 200 bp, Lawsonia intracellularis
ggactcaataaaggcttctacaactttaagacgtttggtaagttttttcttttttgtttgtgatttagttgactgagattcttcacgtagggagttacgcagtgtttcaagatttaattcttctaaaagtccacgtatagcttcagcacccattcctacaacaaaagattcttcattaatatgctctatgacttgtaagt

SEQ ID NO: 7075 - DNA, 200 bp, Lawsonia intracellularis
attgatcttcagaaataacttgcatttttgttaagttagtagagcctggatcaagtacaatatatgagtcaaaatataaaactttttcaagatctgccatagccatatcaagaagggtaccaattttagatggtagagttttgagaaaccatatatgtgcaactggagctgcaagttctatgtgacccattcgctcacgc

SEQ ID NO: 7076 - DNA, 200 bp, Lawsonia intracellularis
cttactttagaagcaataacttcaacaccgcatttttcacagacaataccacggtgtttcattcttttatatttaccacagttgcattcgtaatctttaacaggtccaaaaattttagcacaaaataaaccatcgcgttctggtttaaatgtacgataattaatagtctctggttttttaacttcaccatatgaccattc

SEQ ID NO: 7077 - DNA, 200 bp, Lawsonia intracellularis
tctaatattctcaggagaagcaatagaaatttgaatagctttaagattacgaatttgtgtagcatttgcagttgctgtactacgaacagtaaaaagttcatcaaggctcatgtatatgtcccccccccccttcctgaattaggccaatgggttatcttaaatagttattaataattattgattatcttattctttatcta

SEQ ID NO: 7078 - DNA, 200 bp, Lawsonia intracellularis
ttaatccagttctcttgggttttttcttaccctcttcttgatggagagttacattaagtccaagggacataagctctttaactaaaacattaaatgattcaggtaagccagcttcaaggaaattatcacctttgacaattttttcatacatttttacacgacctgaaacatcatcagatttaactgtaagaaattcttgc

SEQ ID NO: 7079 - DNA, 200 bp, Lawsonia intracellularis
aataaataagaagcaccataagcttctaatgcccatacctccatttctcctagtcgttgaccgccgaattgcgctttccctccaagaggttgttgcgttactagggagtatggccctgttgagcgagcatgaattttttcatcaacaagatggtgaagtttaagtatgtacattactccagttgtaactctatttttaaa

SEQ ID NO: 7080 - DNA, 200 bp, Lawsonia intracellularis
tgcttcacctgtacgaccatcatataagatggcttttccgtcactaggaagtcctgcttttgctaaccagtcccatacttcgctttctccagcaccatcaaaaactggagtcattgtgataatgccttttttgagtttttgtacagaagtacgaaatgtatcatcatccattgcatctatttctgcagagatttctggtg

SEQ ID NO: 7081 - DNA, 200 bp, Lawsonia intracellularis
attcaaagacacttttaacttgttcacgaagtgattgtattgcaacaccttgttcaaccatattatttaactgctgtccaagctctttagcggcccagcctaaatgtgtttccataatttgcccaatattcattcgtgatggaacgccaagagggtttagtacaatgtctacaggtgaaccatcagcaaaaaatggcata

SEQ ID NO: 7082 - DNA, 200 bp, Lawsonia intracellularis
tcttcttcaggtaaaatacaagaaacaacacccttgttaccatggcgtccagccattttgtctccaacagcaagcttacgtttcaccgcaatatgtactttaaccatacgaatgactccaggaggtaaatcgtcaccctctgtaactttccctcttttagaatcataaattgtttttatatagttgatttgcttttcata

SEQ ID NO: 7083 - DNA, 200 bp, Lawsonia intracellularis
ttgtgaaagcatttctgtgatagtttcattaagttctttgcttttaaatgcaccctccagtttttttaagggtagtgaatctaacagttctggagttatggcactattttcttctgcaagtacttctcctttccctttaccaagtatagttgttcctagttgttttccatttataaggggaaggattttttccttcatgc

SEQ ID NO: 7084 - DNA, 200 bp, Lawsonia intracellularis
gttgggtaatggatttaatatagttttgctctttgctatccataagacttatttcatagtcttctataaggcgggtacggtcatctttttctcctgaacgacgattaaatacttttacatcaataaccgttccttctattcctggaggtacttttaaagatgtattttttacatcacgtgctttatcaccaaagattgct

SEQ ID NO: 7085 - DNA, 200 bp, Lawsonia intracellularis
cgcaataacttttcttcaggagtaagttgtgtctcacctttaggtgtaattttcccaactagaatgtcttctggcttaacagctgcaccaatacggataataccgttttcatcaagatttgaaagcatttcctccccaacattggggatatctcttgtgatttcttcaggaccaagctttgtgtctcttgccacaatttc

SEQ ID NO: 7086 - DNA, 200 bp, Lawsonia intracellularis
aaattcttcaatatgtacagatgtatatgtatcttctttaacgactcgttctgaaataagaatagagtcttcaaagttatatccacaccaaggcataaaagctacaacaagattttttcctaaagcaagacctccgtcacggatagctgggccatcagcaagtacttctccttttttgacgatttgtcctgggatacagg

SEQ ID NO: 7087 - DNA, 200 bp, Lawsonia intracellularis
atggtcgttgtccaaaacagaagttttgatttgacttgtggtatttcagtaaatcatatgcacggacaccgccgaattcaggataaaggttgggatcgtcataagaaacaataattctgttagcatcagcataacgaataataccatcaccttcagctaaaatacatgagccagagtcatgagcaacatctacttccatt

SEQ ID NO: 7088 - DNA, 200 bp, Lawsonia intracellularis
cctgttcctaccaaagggcgttcagaacgtaataatggtacagcctgacgttgcatgtttgaacccattaatgcacgatttgcatcatcatgttcaaggaatgggataagcgctgcagaaatagaaaccatttggctaggagaaatgtccataagggtaacttcttcccttgcagacatcaaaacatcacctcgtgcacg

SEQ ID NO: 7089 - DNA, 200 bp, Lawsonia intracellularis
agtagttacatagtcatctataagacgtccttcactatcgatggatgcatttgcttgagcaataacttcactaaactcacaagaagcatctagatgtatgatttcatcagtaacataaccgttacggactaccctatatggagtttcaatgaatccataatcgtttacttttgcatatgttgttagtgagacaataagcc

SEQ ID NO: 7090 - DNA, 200 bp, Lawsonia intracellularis
caatattaggtccttcaggtgtttcaataggacaaattcttccatagtgagatacatggacgtcacggacttcaaaaccagcacgctcacgtgttaatcccccaggacctaaagcagagagacgacgtttatgggttacttcagataaagagtttgtttgatccataaattgcgataactgtgatgtcccaaagaattct

SEQ ID NO: 7091 - DNA, 200 bp, Lawsonia intracellularis
ttaaggagagctgctactggtttaggattaataagatcatgtggcatgagtgtggcaacctcttggatactcatgcgttcttttatggcacgttccatacgaacaaggcctatacgatattgattttctacaagttctcctactaagcggacacgtcgatttcctaagtggtcaatatcatcagctgggccatggctatc

SEQ ID NO: 7092 - DNA, 200 bp, Lawsonia intracellularis
ttttagatgtgtaagtaacttaatcgcctcaagaatatcgttatcagaaagcgtacgaagagttgcattttcatagttatctaatctctgattaagcttataacgtcctacaggagagagatcataataactattatttctaaagagattatcaaagaaagaagcagcaatttcaggcgtaggaggtgaacttggtctca

SEQ ID NO: 7093 - DNA, 200 bp, Lawsonia intracellularis
agcgacgataaatttcttcttgagctttttctgttgtaggtattttgtcttggactaatgtatcacggatagatgacgaggtatcattacctcttgtgtgtaatacagtaaaggtagtaatcccagcatcacgaaatgtttgtatgagaccttctgtaatttcttcagcagattcagcaaggatttcacctgttgaagta

SEQ ID NO: 7094 - DNA, 200 bp, Lawsonia intracellularis
tcaataatgtcttcagcaaggaattgtcctataactgttgagggatctacttcaaaggcttcaagtccagatgcctccatttgtctccatactcgttttgtaatagtttttcctgctgctacaaggaggttattgtcattatcaagtatatcagtataagcaatatcttttcggaacaagctaggatcaaacttccattt

SEQ ID NO: 7095 - DNA, 200 bp, Lawsonia intracellularis
tatacgtccatcattatctaaaatatatgtttcttttttataaaaaaagttaagaatatcttgttttcccatgcccatagctttaagtaaaatagtggcaggcattttgcgacgacggtcaatacgaacataaaggatgtctttatgatcaaagtcaaagtcaagccaagagccacgcataggaataattcggcatgaat

SEQ ID NO: 7096 - DNA, 200 bp, Lawsonia intracellularis
aaaggacctttcgactggcatgggttttaccactatcatgttcaaaaataattccaggagagcgttgtaactgatttacaataactctctctgttccattaataatgaatgttcctttttcagtcatgagaggcaaagtgccaaagtaaatatcttgttctttaatgtcatgaacagttctactttcagtatcactatct

SEQ ID NO: 7097 - DNA, 200 bp, Lawsonia intracellularis
acatcgtatataattagtcgcactttaattcttattggtgcttcataagtaaggcctttggctatacattctgcttggtcatactttggttcaccaattttgtagttaacaaactcaagacttgatgtgcgattaaagtcttcaataggaaagacagaacggaaaacactttctaatccttcttctgggagaggctctaa

SEQ ID NO: 7098 - DNA, 200 bp, Lawsonia intracellularis
gagtccttcttgtaggaattttttatatgaatctacttggagattaagaaggtgcggaattggcacttcaactttaatttttccaaactgttttgtaagttgaaccattgtttcacctctaaataaggttggccgaatagctatgaataaaattcaagaagcccataatagtacttatccaaaagtacaacaaaactaaa

SEQ ID NO: 7099 - DNA, 200 bp, Lawsonia intracellularis
taacttatccaaaattttggaaaagctattataaacaatagtgtctaagtatattagggaatacttgagtataactacctcgttgatgcaatgcttgaatagatagatattaaaaaaaagacaaaaaagtagcaagtatttttgtaatgtcaaggttaaaattatttttattttagttaaataaaagtatcattcatttt

SEQ ID NO: 7100 - DNA, 200 bp, Lawsonia intracellularis
tttaatggttgtgtatgacataacaaaaagctagacttatctaaattaattaacatcagttatattaaacattatttttttggctgcaataagagctttttcaaattctttttctttatgtgcaaaagataccatatttgtttcaaatggtgaaggaacaagaaaaatattatttttttgcattgaacgaaaaagaatac

SEQ ID NO: 7101 - DNA, 200 bp, Lawsonia intracellularis
tatataattgtgtattagttgtttttacgtcatcaaaactttttaattcattatttgtaaaaaaaactgtaaacatagatgcaaaatttgatacttgtacagggacacctttgtctttgaggattacttcaagctcgttagcaaaagtagcaacctgtttttcaagtattgtataatttatatctttaagaagttgtaat

SEQ ID NO: 7102 - DNA, 200 bp, Lawsonia intracellularis
gtttcaaatcctgcagtcatgacaagaggatttcctgataatgttcctgcttggtagatttctcctaatggtgcaatatgctccatatattttgcttttcctccgtatgcacctataggtagtcccccaccaataatttttcctaatgttgtgagatctggagttatatcaaaacgagtttgtgctcctccatatgcaac

SEQ ID NO: 7103 - DNA, 200 bp, Lawsonia intracellularis
acgaaaacctgtaattacttcatccataatgaggagtgttccatgagcatcacataatgcacgaaggccttttagaaaaccttctttgggaggtataagccccatatttgcagctataggttctacaaatacagcagcaagatctttaccatacataacaaataagtcttttactgtacttaagtcattatatggagcta

SEQ ID NO: 7104 - DNA, 200 bp, Lawsonia intracellularis
agagagtgtctcgaacagtgacttcaggaactcctggagtcccagggatagatagtgtcgcaactccagagcctgcgctagctaaaaaaggatctgcatgaccatggtaacaaccaataaattttaataccttattacgtcctgtaacacctctcgcaagacgtagagcactcatagtagcttctgtcccagagcttacc

SEQ ID NO: 7105 - DNA, 200 bp, Lawsonia intracellularis
atacgaatcatatccattccagggaatgcatcaataatttctttagctaatagtacttcagctttacatggtgcaccaaaggttgttccatttgaagctgctttttttatagcatttgttacagtagaattagtatgaccaagaataattgctccccaagaaagaacaaagtctaataattcttgaccatctactgtagt

SEQ ID NO: 7106 - DNA, 200 bp, Lawsonia intracellularis
gagatatgctcctttagcggactctataaagacaggttcacatcctacatttcggcaagctcttacaggactatttactcctccaggtataagttttacagctttggaataaagttcttttgaagattcttcttgcactatatgttcctctcattaactaattgaaaatatttcatagatgttttttttaattctttaat

SEQ ID NO: 7107 - DNA, 200 bp, Lawsonia intracellularis
actttcaaggatagcatagtctttaagtactgttttgttttttaactgctcaataactttttcacaatcccctttattgcgtccatgaatcatcgtatataatgtatatggccaatcttcggcagttgagggcctgtggtaacaatgggaaatagaaggatgttgagctgcttgttctcctgcttcatctattaatgtat

SEQ ID NO: 7108 - DNA, 200 bp, Lawsonia intracellularis
catctattttccaagctaccatagcattgtgttcccatccagtttgttggtgttttatgcttgcaccaaatcggcgaattacactatcatctttcatctgttgtaatagttcaagtacaaaatgttcttctgtaccaacagcattagcaatatctgcataaggtgtcatagagtcagggatgttgttttgaaccattcta

SEQ ID NO: 7109 - DNA, 200 bp, Lawsonia intracellularis
aggatagcacattctatttctgagaaagagtagctcatgtataagatatcctgtgtttcagaataatatatttattaacttaatatgttagtataactaaataatttttatctatactctaaaaatagatgactacagtttttttattcatagaattaatacactataatagcatagctcatttacttcttatatggaag

SEQ ID NO: 7110 - DNA, 200 bp, Lawsonia intracellularis
tctttattttagtagtcattataggaggagtaactagtttaaatagtaaatatattgtttttatttaagtaaaaagataagattttttatgataatgtttataaatttatagcttttttgaagaagaggtaggattaaattagtaaaaaaataagtatgatatattaagatagttaaaagttaagttatagtttttatat

SEQ ID NO: 7111 - DNA, 200 bp, Lawsonia intracellularis
agcggcatgatatattatcttagtaaaattataataaaaattttttatagtaacttgttaagatgaagtagagttagcataatagtgactatcattataattacagttggtaatatagtgaaatattataacgactattagaaaatgttcattacttttaatttaaatatgttaactacttcttttatgaagacaagtta

SEQ ID NO: 7112 - DNA, 200 bp, Lawsonia intracellularis
atatatttttaaaggtagaaaaggtatgttagctacacaaaagctgagtgatccagttctatgtaaggttttacttaataaattaaataaccttttagatcgtcctttaagatttatggaggtttgtggaacacacacagtatctatttttaaaagtggtataacaacccttctcccaaaagggatagatcatctttcgg

SEQ ID NO: 7113 - DNA, 200 bp, Lawsonia intracellularis
gacctggatgtcctgtatgtgtaacacatgatagtgaaattgaactttttttaaggtttgcagctaaaccaaatgtaattattgctacttttggtgatcttatgcgagtacctggtcctaataggaaatcacttaagcatgcacaagcagagggtgcaaggatttctattatctattctcctatggatattttaaaaatt

SEQ ID NO: 7114 - DNA, 200 bp, Lawsonia intracellularis
gctattgataatccaaaagatatagtaattttaccagggattggttttgaaacaacagctcctactatagcagcaacaatccttatggcagaaaaagaaggtattaataatattgctgttattccatgccataaactagttccaccagcacttgaaatgttactagcagatccagattgccaaattgatgggtttctttt

SEQ ID NO: 7115 - DNA, 200 bp, Lawsonia intracellularis
gcctggtcatgtatctatggtattaggtttagagccatatgcatttgttgttgagaagtgggggaagcctgctatagttgctggttttgaaccagcggatattttagatgcgttatgccgtatggcaaaacaactacaaacaggaaagtacaaagtagaaaatgcctatccacgggctgtttatcaagatggtaatccac

SEQ ID NO: 7116 - DNA, 200 bp, Lawsonia intracellularis
aagcacgtaatattttatataaggtgtttcaagtaggagactctcaatggagaggattagagtttctcccaatgagtggccttacttttagagatcattataaaaaatttgatgcgttagaacgatttgatataacaggagtcaatgtacatcctaacactggttgtatttgcggagaaattcttaaaggtaaagttaca

SEQ ID NO: 7117 - DNA, 200 bp, Lawsonia intracellularis
ccttctgcatgtttattatttgggaaagagtgtactccagaagaaccgataggtccctgtatggtatcaacagaaggaagttgtgcagcatactttaaatatcatatgataagataagcatactttttataagcaagattttagtaatagataacttagagtgcaatatagattaagttattactatcttagtgctatgt

SEQ ID NO: 7118 - DNA, 200 bp, Lawsonia intracellularis
atttatgagaggtaaagaataccacttttaaatgaaataaaaattgttaggccagtatacctttttaaggtattaattagaggaataagcgtatattatgactctaatttattaattattctgctttttaattagaaatatatctctatatgttaataagtaacaatatagattatgttttttagcataatattactatc

SEQ ID NO: 7119 - DNA, 200 bp, Lawsonia intracellularis
tagatgaaataacataaaaagttttgatattaggtcaaattttgtatattgattaaactttttgtatagtaatgtatcatttttataattattgattaaattatccatagacataaaaatttatgttggatataagctagaaatacaaaattattatttcatgcggtagataatacgaccacgtgttaagtcataaggag

SEQ ID NO: 7120 - DNA, 200 bp, Lawsonia intracellularis
atagttctactttaactcgatctccaggaagaatgcggatgtaaaatttacgcattttccctgagatatgcgcaaggacagggtgtccattatcaagctcaacacgaaacattgcgttaggaagagcttcttgtacaacaccgtctacttcaatggcatcttcttttgccatggagcctcctaaaaaataaatgggcctt

SEQ ID NO: 7121 - DNA, 200 bp, Lawsonia intracellularis
aagtatcccctaaaaaaagaggtatgtcaatagttataagataatctgtttaaatatagtataactaaatacagtaagggagattttatgaataaaacgttaagtatgagtttgtctgtgtcttgtaataagccagaagccaataataattaatggtacacataataattgtcccattgtaagccaaccaaaggcaagat

SEQ ID NO: 7122 - DNA, 200 bp, Lawsonia intracellularis
aaccaatatgtgcatcaggttgtcgaataaattctattccaaaacgaaataatccataacataacataaatagtccagatggattaccttcaggtcgaggtttagaggtataactccacatgattataaaaagaataataccttcaaaaaatgcttcatagagttgagagggatgtcgtggatatggacctccacttgga

SEQ ID NO: 7123 - DNA, 200 bp, Lawsonia intracellularis
aaaactattccccaggacttatctgtaatagctccccaaagttcaccattaatgaaatttccaatacgtccaaaaaaaagtcctggtgatattaatggtgatagaaagtctaatacagctaagcagtgaagttgtcttttatatccccaaatacaggcagcaacagtagcacctagaaatccaccgtgaaatgacattcc

SEQ ID NO: 7124 - DNA, 200 bp, Lawsonia intracellularis
accattccaaattttgaaaacctctagtgggtctgtatataatatattaaagtcataaaaaagaatataaccaaaacgaccaccaactatgacaccaatcataccccaagtcagtagatctccaacatcattagtagttagaatagaatatgatttttttgctctatatcttccaagtatccaggcacaaaggaatccaa

SEQ ID NO: 7125 - DNA, 200 bp, Lawsonia intracellularis
ttaaatacataatgccataccaatgaacatcaaatgagccaaaagaaaaagcaatgggatcaattaaaacatatttcatatttgttagctttctttttgttgttacaggttagtagataataacaacaatagagtgagtaagtgacactaaaaaaattattatatattaggttaaactagctaattacatttacagtaaa

SEQ ID NO: 7126 - DNA, 200 bp, Lawsonia intracellularis
aatatgttatataaggataacttattattataataataaaagagtaatggatatgtagtctctttgcaagatgtaatcttttattgtgacagatgtggtatagtaatatagttaagcattatttttagtatactatcaatatccattattgagctatcaatgagtatagcatcttttgcgggttctaatggcgcaattgt

SEQ ID NO: 7127 - DNA, 200 bp, Lawsonia intracellularis
tctatttttatcaagtttatctctataattaatagaatgaagaatatcattatagtcttgaaatattccttctttttttagttgattaaagcgtcgttgcgcacgaattattgggtttgcatctataaaaaatttaaattgtgctttaggaaaaacttctgtacctaaatcacgaccttcagcaataattgacatagtat

SEQ ID NO: 7128 - DNA, 200 bp, Lawsonia intracellularis
ttcctatttgttgttcaatatttttaagatattctcttattatggttcgttctcctagttgtgcagctagtattccagctgtttcactacgaatttcatgtcctatagattccccgttacacatgagtaaagaatttttaccaaccccttggagttgaaaggtaacctttttacattgttcttgcagtatagagtctggc

SEQ ID NO: 7129 - DNA, 200 bp, Lawsonia intracellularis
agtgtttctgctttgtttcctaattggagggcaagcttacggaacatagcccctgtatctagatatggtaaatttagtattgttccaagtttttttgcaagagtagatttaccaacaccagctggtccatcaattgtgatgatggtatgttgttccatcataaaaatagcctcaaaatagaatgtgtttatattttaaac

SEQ ID NO: 7130 - DNA, 200 bp, Lawsonia intracellularis
taatatcataaaatagtttaaattaaaataataggctggatgataatacaatagagttagtttgattactttagattatatatgctatgcgtaagggttaacatacggctatgttagatttaacttgtaaaaattatagtaaggattagaggttagtaagatcaatggagactaaatagaagctatgttattgaaaataa

SEQ ID NO: 7131 - DNA, 200 bp, Lawsonia intracellularis
tctagtgtatattttacagcaacactaaagataactagaatcatgaagagttttaaccaaatcccagggataaatttttgacagtatgcgcctaaatacataccaatgatacctccaattccaaataataatgctaatagtaagtctggagcaactgatatattaggatatagtaatgctaaaaaagagtaaaataaaac

SEQ ID NO: 7132 - DNA, 200 bp, Lawsonia intracellularis
acttattacagatatgactccactacccatgagagcagcgcctgcaattgtatgaattggtaatccaaatatagaagtaaggaatggtactatgatagcactaccaccaataccataaatacctccaataattccaacaagaaggcttaataagaaagttttaattacagaaaatgtatagctattattagcataggtat

SEQ ID NO: 7133 - DNA, 200 bp, Lawsonia intracellularis
aacttatttggcgtaatgatttttgtataactttagtagaagaagatttaatatttataagtggatggatactttttttagggaaaaaggaactaagtaaactttgggttaattttgccccaataattaaaagaactgtagctacaaatattttaaagctttgactatcagaaagataggtaatacgaataagcgcacct

SEQ ID NO: 7134 - DNA, 200 bp, Lawsonia intracellularis
accataacacctggtatacccccaaaaataataatccaagcaagaggccaaatcatacgatgttctcttgcatattggagtgctcctacggggttagaaatgacattataaagttgtgtagtagagcttaccgatgggtttgtataaccaagaaaagaaatttggaatggtataagaagaaatgctccagaaagaccaag

SEQ ID NO: 7135 - DNA, 200 bp, Lawsonia intracellularis
cattgacataaaaaatgatacaataaatgaagctaacggagggataaaaaaagaggtttctactcctgcggtagggaaatacatagtataatccttatttattaagctatattttaacttcaagtaaaatatgcattattatactgtaatctttatggcaagcatacacttcatatatgaaatgaaaatgtattttttca

SEQ ID NO: 7136 - DNA, 200 bp, Lawsonia intracellularis
tattattttcttcaaagcttagatatatacagaaatagagcgcattgaagaagtatttttagagaattctaatgaaaatataggggttaaaaaaaaaaaattgtcttttacccctagacgacttcacagcatgctttatttttcacatcagagtttgaagttaagcatccttattctaacatagggagaaataattacat

SEQ ID NO: 7137 - DNA, 200 bp, Lawsonia intracellularis
tttaacttaatcaatacatgttacttgtatttgtaatctctaggtattagattaaggtttgcgaggaggtactatacatgggtaaaattataggtattgaccttggcacaacaaattcttgtgtctatgtcatggaaggtaaagaaccaaaatgtattacaaatcctaacggtggaagaacaacaccttctgtggttgct

SEQ ID NO: 7138 - DNA, 200 bp, Lawsonia intracellularis
tttactgataaagataggcttgtaggtgatgcagcaaaacgtcaagcaattacaaattctgctcgaacaatttttgctgtaaaacgtcttatgggtcgtagggcagactctccagaggttgtacactggaaagaacatgctccatataagattgtagctgcttctaatggagatgctgctgtagaaattgatggaagaga

SEQ ID NO: 7139 - DNA, 200 bp, Lawsonia intracellularis
atatagtccacaagaaatttcagcaattattttaagcaaactcaaagcagatgcagaagcatatcttggagaatctgttagtgaagccgttattactgttcctgcatattttaatgatgctcaacgtcaagcaacaaaagatgctggtcgtattgcaggattagatgttaaacgtattattaatgagccaacagcagctt

SEQ ID NO: 7140 - DNA, 200 bp, Lawsonia intracellularis
cattagcatatggttttgacaaaaaagcaaatgagaaaattgcagtttttgaccttggtggtggaacctttgatgtttccatacttgaagttggggatagcgttgttgaagtactagctaccaatggagatacatttcttggtggtgaagattttgatcaacgtattattaattatcttgtggaagagtttaagaaagaa

SEQ ID NO: 7141 - DNA, 200 bp, Lawsonia intracellularis
caagggatagatctttcaaaagataatatggcattacagcgtttgaaagattctgctgaaaatgcaaaaaaagagctttcaacagcaatggaaacggaaattaaccttccattcattacagctgatcagtcaggacctaagcatctattaattaaactcactcgtgctaagcttgaacagcttgttatggatcttgtagg

SEQ ID NO: 7142 - DNA, 200 bp, Lawsonia intracellularis
aagaacaatagagccttgtagtaaagctttagaagatgcggggttacagacatctaacattgatgaggtcattcttgtcggtgggatgactcgtatgcctttagtgcagaagaaggtagcagagttttttggtaaagagccaaatcgttctgtaaatcctgatgaagttgttgctatgggtgctgctatccagggtggga

SEQ ID NO: 7143 - DNA, 200 bp, Lawsonia intracellularis
ttttagcaggagatgtaaaagatgtcttattgctagatgtaacacctctttcccttgggattgaaactatgggaggcgtttttaccaaacttattgatcgtaatacgactatccctactagaaaaagtcaaacgtttacaacagctgcagataatcagccttcggtgtctattcatgtcttgcaaggtgaacgcccaatg

SEQ ID NO: 7144 - DNA, 200 bp, Lawsonia intracellularis
gcaagtgataatatgacccttgcacgttttgatctgacagggattcctccagcacctcgtggagttcctcagattgaagttgcttttaacattgatgcaaatgggattgtaaatgtttctgctaaagatttaggtacagggaaagagcagtctattcaaattacagcatcttccggactttctgaagcagatattgaaaa

SEQ ID NO: 7145 - DNA, 200 bp, Lawsonia intracellularis
gcttattcgtgaagctgaatctcatgcttctgaagataaaaagaagcaagaaattattgaagttcgtaaccatgcagatggattaatttatagtactgaaaaatctattaaagatttggaaggtaaaattgatgctgagttacaagcagatattacatctaaaattgaagcattgaaaaaagttatggaaggcgaagata

SEQ ID NO: 7146 - DNA, 200 bp, Lawsonia intracellularis
gtgcagctatcaaaaaagcaactgatgagttagcctctgcttctcataagcttgctgagcagttatataaacaaacacaagaaacttctggagcatcgggtgacccaacagacactagtgcaagctccagtaagagtggagacgatgtagtggatgcagactttacagaagtaaaataacctgtagatttccactacccc

SEQ ID NO: 7147 - DNA, 200 bp, Lawsonia intracellularis
cacttatccaacaaaagggctgcaaggcccttttgttgttttttatctatcaaatagtaaaaaataatttttacaataagacaggtatgttttactataaattacttaaagttacatgactttcattttgaaaggaatagggtgtatcatattttctggctttaacatttcatctaattcattttgcgtaatatgacctt

SEQ ID NO: 7148 - DNA, 200 bp, Lawsonia intracellularis
gctctaatagaatagttcttacagattttccagtttcaaatgcttgttttgctattgttgagcatacttcatagccaagaaaaggcacaagtactgtaataataccaatagagttatcaacaaattctcggcatttttcaatatttgctataataccgttgaaacatttatctgcaagtgtatagcatccgttagaaatg

SEQ ID NO: 7149 - DNA, 200 bp, Lawsonia intracellularis
atatttattgattggaacaaactatatgcaattattggttccattacgtttaattcaagttgaccagcctctgctgccattgtgactgttatatcattcccaatcactttaaaagctatttgatttacaacttctggaataaccgggttaattttgccaggcataattgaggaaccaggtgcccttggaggtaaattgat

SEQ ID NO: 7150 - DNA, 200 bp, Lawsonia intracellularis
ttctcccaatccacagcgaggaccacttgagagtagtcgtaagtcattacagattttagaaagtttaactgtaactcttttaagaacaccagaaagctgaacataagcacccgtatcttgtgtagcttctattaaatctggagaactagtgagggttaattctgtaatttctgtaagatatgttgtagcaagttctttat

SEQ ID NO: 7151 - DNA, 200 bp, Lawsonia intracellularis
actgggggactgtattaatacctgtaccaatagctgtagccccaaggttaatttcttgcataagttttgatgtttcttttattcgttcaatatcttctctcatcattattgaccaagcacgaaattcttgacctaatgtcatgggaacagcatcttgtagttgtgttctacctatttttataatgtttttgaattcatcg

SEQ ID NO: 7152 - DNA, 200 bp, Lawsonia intracellularis
gcttttttatctattgtatcacaaagatatgaaatactagtaataagactttttaattctttaataagtgcaatacgtaaagctgtaggatagacgtcatttgttgattgggacatatttatatcattattaggatgaaggtattggtattctcctttctcatgtcccataagctcaagagcacgattacaaattacttc

SEQ ID NO: 7153 - DNA, 200 bp, Lawsonia intracellularis
attagcattcatatttgtacttgtccctgcacctccttgaatacaatccacaacaaattgatcaaggagttctccatttatgatttcattacatgcagcagagatagcatctttttttttatcagaaagaagaccaagtttattgtttgcaagtgctgcagcttgtttaacttgagctaatgaagtaattaatgagggat

SEQ ID NO: 7154 - DNA, 200 bp, Lawsonia intracellularis
atttcccaataacttcacctgtaatttgaaagttttcaacagcacggagtgtttgacagccataataagcttctataggaacaagcacttctcctaagctatcatgttctttacggaattcatgcatgacacttccttgtttttatttttaagtttaattaaatttttaaggtagtatataacagtgagttttgtttttg

SEQ ID NO: 7155 - DNA, 200 bp, Lawsonia intracellularis
ataaattagtgagggcgatatatactttttctataatgtagtaaaggactttagttattttgttataggttataatatgataaagttatcaactttgcctttaaagttaataagatatatcatgatgagtgaactttgacatgccatggttcaaaacgtacaccgagaaaattatctttaggataacgtaacgaaagata

SEQ ID NO: 7156 - DNA, 200 bp, Lawsonia intracellularis
accactaactgaaagttgtttatatacagatgttgtggtaaaatcagctgtgaaattacggtaaccaaaaccacgttggcctacatcaaaatcaccaattccatgaaatgaatacccaggaggagctagtgatctagaggctagtgataaattcccattatgcttttgtgcttttgcaagaaaaagataaaactgtttta

SEQ ID NO: 7157 - DNA, 200 bp, Lawsonia intracellularis
taataccacggactccactagtaagaacaacatccttaccaataattttttgtatttctgcccattttttttgagctaaccccttatatataaaattccccattccaggaactttataaacattatgttggggaatagttgctgtgaaggagtttaaaggttttttatccataaaaccataattagatgcatcaacatag

SEQ ID NO: 7158 - DNA, 200 bp, Lawsonia intracellularis
aataactcctctagaaaaagaatttctttttttgaaaaattttctatagaagaacgttttgctacattaattgcttcgtctacactgagtaagtaaaaccttccatgtcctactatatcctgaattgcagttagcttagccatgctactatcaagtaatgctttttctttcgcttgaagaatgatatctgtggggaatgg

SEQ ID NO: 7159 - DNA, 200 bp, Lawsonia intracellularis
cttatcaaagttacgcatttttagaaaatagtctctaatttcttcttctgtaagagttgtaatattttcttgacgttgtgaagattttagtttgccatgtcgattgtttttttgaaatggagcacgagaaagtgattcttttttctttagttttcgtggtgctgcataaatattatgtatccatgtaaaacacgcaatga

SEQ ID NO: 7160 - DNA, 200 bp, Lawsonia intracellularis
cagccattagtcctatagaaagaaatttgcgtctggttaacacaagttactccaatggtgtaaaggatgacattgtcaaagccatgtttaacactaaactaattatataagatacaatagataccacaaagtcctttttatgagaaactaaaggtagtttcaaggatatttttaaaaattctgctaaaatacaagctaac

SEQ ID NO: 7161 - DNA, 200 bp, Lawsonia intracellularis
taaaggagtatatcagagcaagtttaaacaatatagttattttatacaataaaatatgatggttacatgttatatgtgtttattcttatttaaagcttcttgaccgaaaatttcatttcacttagcgttatattttgtgatataatagaataaattttggtggggtgtttggatggttcaaaaaacagagtatatttggt

SEQ ID NO: 7162 - DNA, 200 bp, Lawsonia intracellularis
ttgatggggaatttattccttgggatcaggcaaaaattcatgtactttcacatgcgttacactatggtacaggagcctttgaagggattcgtgcataccgttgtatagatggcacatctgctatttttcgtctttcagaccatgttaaacgattattccactccataaaaattcttggattacgtattcctcacttagaa

SEQ ID NO: 7163 - DNA, 200 bp, Lawsonia intracellularis
gaagatatctcctcagctattattgatacactaaaaatcaataaacttacagagggatatattagaccattatcttttgttggtgaaggtattatgggtgtacatcctggagataatcctattaagactattattgctgtatggccatggggagcataccttggagaagaaggtcttaaaaatggaataaatgtaaaaac

SEQ ID NO: 7164 - DNA, 200 bp, Lawsonia intracellularis
aagttcttttgttcgtcatcatgttaatgcaatgatgacaaaagctaagctttcaggaaattatgttaattctgtccttgcaaagatggaagctaagtctagtggatatgatgaagcgcttatgttggattcagcaggctttgtttctgaagcttcaggagagaatatttttattatacgtgatggggttattaagacaa

SEQ ID NO: 7165 - DNA, 200 bp, Lawsonia intracellularis
cacccttaacctctattttaggtggaattacacgtaattcagttataagcattgcaagtgacctaggttatacagttattgagcagcagtttactagagatgaactttatatatctgatgaagctttttttactggaacagctgcggaagttacaccaattcaatcagtagataatcgtatcattggtgaaggtaaaata

SEQ ID NO: 7166 - DNA, 200 bp, Lawsonia intracellularis
ggtagtataacacatgctattcaaaaaaaatattttagtattgttaaaggagaagatcctttttataaaaattggttaaccttttttaccatttagttatttttgttggagtaaatagttacttatatgaagcaggtatcattggctatcagatataggccacagtcttttaaggaggttgtggggcaagaaattgttaa

SEQ ID NO: 7167 - DNA, 200 bp, Lawsonia intracellularis
aaaaattttatctcgtgctgctgctgaaagtaaagttgttcctgcgtatttgttgagtggtacaagaggggtagggaaaacaactattgctagaatttttgcaaaagccttaaattgtcaacaggcgcctacagctgaaccttgtaatacttgtgagcagtgtaaacgtattactaaaggtatacatgtagatgtagtgg

SEQ ID NO: 7168 - DNA, 200 bp, Lawsonia intracellularis
aaatagatggagcttctaatcgaggtgtagatgatgctcgtcgattacgggaatctattgcttatgctccaatggaagggcgctataaagtttttattattgatgaagcacatatgcttacacgagagtcatttaatgcattattaaagacattagaagaaccacctcctttttctacttttgtttttgctacgacagaa

SEQ ID NO: 7169 - DNA, 200 bp, Lawsonia intracellularis
cctcataaattccctgtaactattataagccgatgtcaacattttgttttaaaaccacttactaaagaagagcttatttataaccttattcatgtacttaaacaggaaaatatttgttatgaagataatgctattcagttaatagctcgaagagcatctgggagtatacgtgatagtatgtcattacttggacaaacatt

SEQ ID NO: 7170 - DNA, 200 bp, Lawsonia intracellularis
aatgtttagtaatggcatattaactgaaaatgttgttcgaaatgtattagggttagcagagcaagaattctatgaaaagcttcttagagcattcaaagatcaaaattacgaagaggtagtaaaacttaaccaaatattattagagaaaggagttgatttagggttttttcttagagaatttgctacgttgtggagaaatc

SEQ ID NO: 7171 - DNA, 200 bp, Lawsonia intracellularis
tatttttattgagaaaagtttctaagttagatgctaatatgctgggtatgcttcctgatgaaataccacgtttaacttcattagcgaatttatttgagcctatataccttcatgctgcttggcagatggttcttgaaaatcaacgccaaatacttatgagtcttgaacctccagtagctttagaacttttatttcttaac

SEQ ID NO: 7172 - DNA, 200 bp, Lawsonia intracellularis
cttacattattacctcatcttgtatctcttgagcaaatttctaatgggttagctgcattatcttcaacatctttagaaacagagatatctaataaacttagagataactctatgaagaaagatgtcatctctgctagtacagaaagtgaatctatttctaatacaaaatttcaaaatgagtaccaagaagttgttgaggg

SEQ ID NO: 7173 - DNA, 200 bp, Lawsonia intracellularis
agatttgcaatttatcagtgttaaagatgtaaaaagtaagagagatactatttcctcttctatgaatgaaggggagattattgaagaaccaacatgggagggctttttacaatactgtagcaaaaatggttcaactataaatacatattttttaaataaacttacaggtatatttcaacaaaataccttagttataacag

SEQ ID NO: 7174 - DNA, 200 bp, Lawsonia intracellularis
tagattcacaatttttatatgaaaaacttatatctgataaacttgaaaaattatatgagcttgtccataactatgctggggaaaaatatactgttcaacttatagagcctaaaaatacctttaaattagaaacagaaattaaaaaagatattgtttctcatcctgttattcaaattttacaacaaacttttgatgcagaa

SEQ ID NO: 7175 - DNA, 200 bp, Lawsonia intracellularis
ctattacggtgtactccaactacaaatttacatattaaacctaataaatgaaagtaaaggaatacagttatgcaaaatatgaatgaattagtacgtcaagctggtcttatgcagaataaaattgccaatttacaaagagaaatgggtgatcgtactatagaagctacaagtggtggggggatggtaaaagttattgcaaa

SEQ ID NO: 7176 - DNA, 200 bp, Lawsonia intracellularis
ctgtaaacaggacattaaatcaatagagattgatcctaaagttatagagtcaggagatattgaaatgatacaagatcttattcttactgctgtaaatgaggctatacgtattagtcggaatacaatggaaaaagaaattagtgctataactggtggtatgcaacttcctggtatattataatacttttttatctaaagtt

SEQ ID NO: 7177 - DNA, 200 bp, Lawsonia intracellularis
agacaaaatttaaataataatacataaaaactagtaggatgtgttgtggatcagcatataccagaaatattaaggactgttataggtcaattaactaaacttcctggattagggccaaaatctgctatgcgtattgctatgacgtttttaaagtggcctgaaagcgaaactcgtagtcttgggaaatctatttatgaatt

SEQ ID NO: 7178 - DNA, 200 bp, Lawsonia intracellularis
acgagataaactaggactatgttcttcttgtggtgcactgtcagatagtaacctttgttttgtatgtgcagatagtgaaagattagataatcttctttgtattgtttctgagtgggatagtatggtgacattagaagaagttggtttttttcaagggcgttatatgattttaggaggattactagcacctcttgataata

SEQ ID NO: 7179 - DNA, 200 bp, Lawsonia intracellularis
tgggcttagacaaattagagattgatcggttaatagatcgtttaaacaagggagaggtaaaagaagtaattcttgcattaggctcaacaattgaggcagaaaccacagctacaatgatttatagtttaattagtaaacgtttcccttatattcgagttacaagattagctcagggtatccctcttggagcagaagttaaa

SEQ ID NO: 7180 - DNA, 200 bp, Lawsonia intracellularis
tttatggatagagaaacactgaggcagtcattacaatataggcaagagttatcttaatttttttgttttctaacttcattaaaagccaatagattggtattacctaagtatattagaatatattcaagtcatttatataaataaaattttttgagagctatataaaaagactaatatgtttagcatgataaatgggtaag

SEQ ID NO: 7181 - DNA, 200 bp, Lawsonia intracellularis
tattttttacaaatatcttaccaatcaacaggaattcttatgcattggttatcattatttataaattgaacatattgatttgaatgcccaaaaagaaataatttattagtgatagaaacatcatttttgcaatattcaataatattttctagattgccttctttccaccactgtaatgcttgtaatccatttgctgtttt

SEQ ID NO: 7182 - DNA, 200 bp, Lawsonia intracellularis
ttttatatttaatgtagcttgtgctagattatctagtgatattctgtgggataggcttttttttatttctttgagtaaatcaagtgaaggaaggttctgtaaattatagggggcaaacggctgtaatacagcataatcaaatgttgtatggttaaaccctataatcaaatcagctttttttaaacgttgaaataagggaa

SEQ ID NO: 7183 - DNA, 200 bp, Lawsonia intracellularis
aaatagtttcttgtgtatagctagtaaaagtatctgtagtagagtcgtaagtaacagcaatactaatttccattttttctgcaaattgccaaccaccgacttcttccgcagaataacgactttctatgtctaatactaagtagtgattagggattgttttattagaaaatgtactgttggaagatgagatagtttgaact

SEQ ID NO: 7184 - DNA, 200 bp, Lawsonia intracellularis
tgttccatattgttttctaattaattatagtagtatgtagtttaattataggtttatgctatatatatatatttagcattttatagtaaacattaccctagagttagtttaactctattagtattaataatataattaatatatattaactagttattgataatagttgaggttaatcaagaatataacgtaatgggtct

SEQ ID NO: 7185 - DNA, 200 bp, Lawsonia intracellularis
acattcataccatttactttaacttcatagtgaaggtgaggtcctgaactccgtcctgtactcccaacgtatccaataatttgacctcgacggacattttgtcctactttgacatctactgtgctcatatgtgcatatcgagatgttagccctgagccatgttgtaatacaacacagtttccatatgcaccatcacagcc

SEQ ID NO: 7186 - DNA, 200 bp, Lawsonia intracellularis
agcaaggataacacgtccattcccagaagcttgtataggagtcccaattgctgcactaatatctaaacctttatgatattcaattcggccagtaaagggagatggtctatttccaaagtgagaagtaataaaaccagaaataggccaaatagatgggatagaagctaaagcttctttcttgtcacgtaaagtttggagaa

SEQ ID NO: 7187 - DNA, 200 bp, Lawsonia intracellularis
gctcttgttgacgaacttcttcaagtcttacttcttctgatagttgtttaaggaaattattgagctttcgaaccattaattcttgtctatgtaagggaagataggttcgagaaaattcttctgttctggaaccaccaatggatgtagcttcaatatctttttcaatattgacaataactctaagttttgagtcaagacgt

SEQ ID NO: 7188 - DNA, 200 bp, Lawsonia intracellularis
tgtactcttgaaaggtcttcttggagtgaactaatttttcctactaaacccattagttgagtattttgtgtttcaattgtacgttcagattcagaaagttgtctttggagtatattagtattttggtattgttgccataataagatattactaataatcactactccaagaaaaatacaaagtgaactaccaagccagcc

SEQ ID NO: 7189 - DNA, 200 bp, Lawsonia intracellularis
tttaatataaaggtttttactagtaccgtttttttctttaagtagtataatatgatagttaccaaaaaacatgtataactcatcaaatactaggtatgaggtttttaatataactaatactactaccaaatattaagcattgtagtatagtcatagcctattaacttttttaactaaaactctactatccaaacttgttg

SEQ ID NO: 7190 - DNA, 200 bp, Lawsonia intracellularis
ctaaaattttattagatgtacaatagtcgtttcccctagcatttgtcaatcgttgtttatgggctagttataggcagtaacaagattttttataaatttataatcatattttagtaggttttttttgtttattatttaactacagctggttataaactgtagtgacgtaatttagttagtaaaaattttttattttttta

SEQ ID NO: 7191 - DNA, 200 bp, Lawsonia intracellularis
aatttatatttaattttactgtactagatattttaaaataatatttatatctactatatagatatactaattatatttagtaatacgataatatatcaataataaatattatagattaattattaatatatagatacatacttaattttaaccttatattatttattactaaatagactaaataaaatattcgttttaaa

SEQ ID NO: 7192 - DNA, 200 bp, Lawsonia intracellularis
tttactttaactatcaataaatatataggtaactatttgatataatttactataataaataagctacaatatagcttatgaagaattatactatttctctgtttaagtaatttattactatctcttacatttattttcatacttatatatgctgtttattttttatgaatcttattcatattttttatttttcagtttta

SEQ ID NO: 7193 - DNA, 200 bp, Lawsonia intracellularis
tttattttagttgtttttttatttataagcagctacttcatctagaaatatctttaaagtaatatggagggatagtttttttattatgagagtattagtaataggttctggaggacgtgagcatgcactgacatggaagctaaaaaaaagtgaaaaggtttcagaaatttttgtggctcctggtaatggggggacagcaa

SEQ ID NO: 7194 - DNA, 200 bp, Lawsonia intracellularis
aatgtgctactaatattcctataaaggaagataatattcaagaactagtaaagtttgtaaaagaatattgtatagatttagtgatccctgggcctgaattaccattaacactaggtatttctgatgcaatgaaagctataggagtagcctgttttggtccttcacggtggtgttctcaacttgaaggaagtaaggctttt

SEQ ID NO: 7195 - DNA, 200 bp, Lawsonia intracellularis
gcaaagcaacttatggttcaacttggtatacctacggctaattatggtatttttcatcatattgacgacgctagagattttataaaaaatactggtacacctgttgttataaaagttgatgggctagcttcaggaaagggtgtttttgtcagccatacagaagaagatgctctaaaagctttagaatatatcatggataa

SEQ ID NO: 7196 - DNA, 200 bp, Lawsonia intracellularis
aaaagtatttggagagtcaggtgctactattgtaattgaagaatttcttgaaggagaagaagtatcattattagctttttgttctggtgatgtagtattacctcttccttctgtgcaagatcataaagctgcttttgatggagatgttggtcctaatacagggggaatgggggtatacagtcctgctccttgtttgccaa

SEQ ID NO: 7197 - DNA, 200 bp, Lawsonia intracellularis
aagatatgctagaagaaatggctaatcttacgatccttcctatagtcaaagaaatgtctaagcaaggccatccatatgttggtatattatatgctggtttgatgatgacaaaagatgggcctaaggttcttgaatacaacatacgttttggcgatccagaatgtcaggtattaatgatgagacttgaaaatgatctcata

SEQ ID NO: 7198 - DNA, 200 bp, Lawsonia intracellularis
acattaatagagagttgtcttacaggctcactttcaggtataaatttgaagatacattcaagtagtgctttgggcgttgttattgttgctgatggatatcctgatacttaccctaaaggtatgcttattgaagggatagaaaaagtaaaagagcaaaaagggatagaagtattccattcaggtactcaactagataatgg

SEQ ID NO: 7199 - DNA, 200 bp, Lawsonia intracellularis
ccaattttattctaatggcggtcgtattctttgtgttacctcattttcttctactttattaaaagctcagcaagatgtataccaagcacttaaaatgattcatatagagaagacaagatatcgtacagatataggtttgaaaggattaaggtataagaatgaaacatgttaaagttgcaatatttataggttctccttct

SEQ ID NO: 7200 - DNA, 200 bp, Lawsonia intracellularis
gatgagtcgattgtaagcccttgtacagaaattttaacgcagttaaatattccctatatatttacagtaagttccgcacaccgaactccagagcgtacagctgaacttatagatagcctagaggcaaatggatgtgaagtttttatttgtgctgcaggaatggcggctcatttagctggtgctgtagctgcccgtacttt

SEQ ID NO: 7201 - DNA, 200 bp, Lawsonia intracellularis
aaagcctgttattggtattcctattacctcttcttctttaggcggaatggatgcactacttgctacagtacaaatgccttcaggctatcctgtagcaacagttgcattggatactgcaggtgcgcgtaatgctgcatggttagctgctcaaattttagcattacatgattcaaaaataaaaaaacagttagatgctgctc

SEQ ID NO: 7202 - DNA, 200 bp, Lawsonia intracellularis
gtaaaaaatttaaagatgatgtactttcagtaagtaaaagtatagaagataaatatactagtattattagttaataaaaatctttttatattataaagtggtcctaatgagattagaaggggaaattatttttcatgggtagtatagtaaaaatgtttcagtggttacgtaaaacagttttttgggaatatttagaagct

SEQ ID NO: 7203 - DNA, 200 bp, Lawsonia intracellularis
atattttgggctggatgtatggctattattctcacaacgtttgttatccaagcttttaaaattccctcaggttctatgttggaaacattacaaataggtgatcatttattagtaaataagtttctttatggattaaaaaatccattttctgatagttatttaattaaggggattgatccaaaagttggagatgtcattgt

SEQ ID NO: 7204 - DNA, 200 bp, Lawsonia intracellularis
ctttcgttacccaaaggatacctctgttgattatataaaaagaatagttggtgtccctggtgacattctcgaaatgaaagataagattttatatcgaaatggtgaaaaagtagtagaaccctatgtacaacattcccaagaagatattattgttcctgtaagagataattggggacctatagttgttccttctgaaagtt

SEQ ID NO: 7205 - DNA, 200 bp, Lawsonia intracellularis
attttgtcttaggggataatcgggatgattctttagattctcgtttctggggatttgttaatcagaagaatatttgtggtaaagcatggataatttattggtcttcacaaggactacataatatacgttttgatcggattggaaagtttatccatgaggataattaaaatatataatagattatgctagatttagagata

SEQ ID NO: 7206 - DNA, 200 bp, Lawsonia intracellularis
caattcccccaataagtataataataccaatccatgcagaaggtttaagcttttgtccaaatagaaaccaaccaccaagagatgtacctaaaatgccaaaaccaccccacatagcataagcaacagcaagatctaaaccttgagttgcataagctaaagctaagaaggctagtcctacacatataagagagagaatacca

SEQ ID NO: 7207 - DNA, 200 bp, Lawsonia intracellularis
taatagatttttttaaagccttgagaacgagctaacattagattagcaataatgtctaaccctgctgctataagaatagctcctatgtaactattaaacattgttgataatctctccatatacattttgttttagttatttgatgaaatatttactgttccatggtgaatgagtattgctccactaagtagggcaaataa

SEQ ID NO: 7208 - DNA, 200 bp, Lawsonia intracellularis
agatattagccgagtaatagtcattttttcatctataacaaagatactaacaagtgtaataagtataagtccaagtccttcccagaatgcataagctactccgattggtaaccctgtagcagcaagtgctaacatataataagaaagtcctatacagataagcataaggagatagccaatatttggttcaaatatccaag

SEQ ID NO: 7209 - DNA, 200 bp, Lawsonia intracellularis
ttcctagttgtgaaagcttcataacagaagtgcctataacttcaaggagaatcgctataattaagtatatccagtgcttaacttgtgaagtatattgacggggttgcataataccttctttaccttgatgttaaaaaattcactaaattgttaattctctttattaggacgtttattattataaagcatatattttgcaa

SEQ ID NO: 7210 - DNA, 200 bp, Lawsonia intracellularis
tagcaaagaagtctgtagcagcttgtctcatagattgcgtacgttcagattccttttcaattaagttattgcactctgtatctgcaagaaaatagagcccttctgtttcttcttttatataacaatacccatcttgtacaagtcggataaacgcttcagtttcacctgcaataaactgtttagagtcatggtgtgttgct

SEQ ID NO: 7211 - DNA, 200 bp, Lawsonia intracellularis
ggatctaaaagatttcttcccattgtttgattatgataagtaattcctgcaagagaagctagggttgggaatatatcaggttgtccacatgggtatggatattcacctggttgaattcttcctggagcataaagtaataggggaatatgattactttgtaatcgacaagctagatatccaggtgtcatgtttaaggatgg

SEQ ID NO: 7212 - DNA, 200 bp, Lawsonia intracellularis
atcattaagtccatgatctccaaaaatagcaaatatggtattttggaaccatggttgagtctttgcaagagcaaagaattcacctaatgcatgatcagcaaagcgcatagaattatattcttcgtcacttgtatatccgtaatttgctaataattctggtgtagggtttaattttataaaccctgcattatcgctaggta

SEQ ID NO: 7213 - DNA, 200 bp, Lawsonia intracellularis
tggtgtatggtttatgaaagcttgaagtttggataacaccaatgaaaggtagtggagaattattaaaaattttgattgcttcacgaaagagatctaagtcagaaattccccaaacatctacgctaggtgaattccacttgccttcttcaaaaagttgaaggtgttctatgttatgatctaatagacctcttatattagcc

SEQ ID NO: 7214 - DNA, 200 bp, Lawsonia intracellularis
cagcttgcacttccaccaagcatataatatttttcatatcctttaaactcattcatgataaggtgttgctcaataagtttttgatttcttgaacttgttcctccagatcgatttacatcaggaattcctgtcatggttgtaaaaattgctcgagcagtagttcttgctggggcaaaaaagaatgggaaaagaagagattc

SEQ ID NO: 7215 - DNA, 200 bp, Lawsonia intracellularis
tttagcaagtttttttagatttggagtaggattatcttctcctggagctagtgatgtgcgaggccatgctaatgattccatgatgataatcacaatgtttatgggagttgattgcttatgaccttttattacacgaataaagtttaggtttttttcattagggttagtgacgttaagccactctgctattcgaggataac

SEQ ID NO: 7216 - DNA, 200 bp, Lawsonia intracellularis
ttgtatgtgttgcagcaatatcagggggaatcgcagacattattttataggtatcataaaggttttgaatgggatttaatcctaatatagcaagatctttgttgatactgaaatatgcattactccatcgaagtggaaaaagagttgtattaatttggccataagcaaataaaaatagtataatcaatgttattattgtc

SEQ ID NO: 7217 - DNA, 200 bp, Lawsonia intracellularis
caacatcctcggggaaaggatgataacattgttatcttattactttttagtattaaataaatgaagaaaaggcataaagatagggtaagacaaaaagcaatacttatccaaaagatagggtagctttcccataccatatgtaatgaaattataggagttgtaagaaaatcaaagagagtggcgtcaagacgttgtcttaa

SEQ ID NO: 7218 - DNA, 200 bp, Lawsonia intracellularis
atagaagaaatatccaaaatctgtaatataaagaataagaactaaactaataatcaggccatataaactaagaatatatggtatgtatttgggtagccgtttttctaaatatgggcttaaaagaagtaaacacagtggaatagatatgatgacagcaatacgtatatcaaatttacttcctatataaaaagcatacaaaa

SEQ ID NO: 7219 - DNA, 200 bp, Lawsonia intracellularis
tttgtgaaaatggtatgttagagagtgcatcatataataaaataaacatacttattcttgcaagtatgagtatgccccatattaaaaataagaattttgttatagtataaataaagggtgggagatgtaatttgatattcataggtaatataaaatctttagattaagatagtaagtagttatgtatgtacatgagaaaa

SEQ ID NO: 7220 - DNA, 200 bp, Lawsonia intracellularis
ctaattatattgacgtcgggtatctaatattttttattatttggataagttgttttttatcaagtaagtataatgaggcaacataacttatgataccaataggtacaactaaacatattgtaattactggaaccccatcagataaaaaatatactgtagtgtaacataaaataaaagtacaacaggctgcaagaagttgt

SEQ ID NO: 7221 - DNA, 200 bp, Lawsonia intracellularis
agcgatacttttttaaaaggaaagtgaacaggaataaagcaatgtaattttttccatagtaaccagcagtaaaaccataaactaagagaagcagctagtggaggaccaataatattaaagaaataaaggagtaatgctcccaatagaaagcttagtgtaatggttaacatacctacgtagaaaggtactgtttgattatt

SEQ ID NO: 7222 - DNA, 200 bp, Lawsonia intracellularis
aatagcataatatgttgaaagtagtgttttacttaatgctatggctggtagcccaggagcataggcacaaagagcaaaggttgttatattaacagcttgaaaattaaattcaccatgataaaatattgcttgaactaatggcatcgagatagctataagtcctaatgcagcaggaaaatttattgctaggataaggctga

SEQ ID NO: 7223 - DNA, 200 bp, Lawsonia intracellularis
cgttttttgatacttcatctccaaatatagatagtttattttgtctatatatagtagttaacacaggtagagctactatcccaatagcgctactaagaataccaataggaaattctatgagtcgctctgcataaaaaagtgatgctacatgtcctgttggtaaaaaagaagtaagcgcagttgctaaaataaatgtgagt

SEQ ID NO: 7224 - DNA, 200 bp, Lawsonia intracellularis
tgtgggatagatgctataaaaatattttttggaatttttaaaacgttttttgttaggattgatatattatagtctacttttggttctgctttttttaagtataaggctaatggtagttgtgacatccattgaaagattccgccacagagtacaccataagaaaggaatactcccctatctattggggtataacctattga

SEQ ID NO: 7225 - DNA, 200 bp, Lawsonia intracellularis
aattaatgcaaatataatgactgaactattaaagagtacaggagagagggcaggtaaaagaaaatgtctttcactatgtaatacagctatacaaccagacgtcagaatagcaaaaataatataaggaagacaaatacgaaagagttgtattgtctcgctatgtacagtatgttcccagttaaatccaggtgctaagatat

SEQ ID NO: 7226 - DNA, 200 bp, Lawsonia intracellularis
caagagcaatagtagggataaaccatactacactactaatagtacctataataagtgcaaatattacagcaatacgaagagttagttgtatgccactattggaacatatagattcatgtcggcaaatactggttaaacctatagaaagtgaaccttcgccaagtagtcttcggaaaaaaaaaggtaagcgtaaagctata

SEQ ID NO: 7227 - DNA, 200 bp, Lawsonia intracellularis
gttaaagcatctgctgttgttgtgctacctaaaagccaagctattgaaacatccctcattaatccaagaagttttgaaaaaaaggctccaatagttataatgagtgtatgatagaacatttttgcaacataatagaagttatattagatttagttataagaatggaatatattgagtaatcataaaaggtcaatcatcgt

SEQ ID NO: 7228 - DNA, 200 bp, Lawsonia intracellularis
attgtaacaaattaacaacataatagattaaaaggaatatattattgaatccaccaggaacatttcatattactgccacagatgggagtgcacgtacaggtgtactttatacagcacatggaattgtaaatacacctatttttatgccagtaggtacagttggtagtgtcaaagcaattgctccagatgatcttgaggct

SEQ ID NO: 7229 - DNA, 200 bp, Lawsonia intracellularis
atatctgctgaaattattttaggtaacacatatcatttatatctaaggccaggagatgaacttattgctcgtaggggtggtttacatgtgtttaatgcatgggaaaaaccaatacttacagatagtggagggtttcaaatttttagtctttcttctttaagaaagttacataaggatggcgtaatatttcgctcccatat

SEQ ID NO: 7230 - DNA, 200 bp, Lawsonia intracellularis
agatggctcaaagcatgtttttactccagaacgagttattactattcagcgtaatcttaattctgatataatgatggttcttgatgagtgtgttgctgcaaatgcagattacacatatacagcccagtctcttgatttaactatacattgggcaaagcgatctcgtgatgtatacccaaaaggggagggagataatcttt

SEQ ID NO: 7231 - DNA, 200 bp, Lawsonia intracellularis
tatttggtattgtgcaaggaggaatgtttaaatctcttagacatagttcagtctcacaacttatagaccttgattttgatgggtatgctattggagggttatctgtaggtgaaccaaaagaaattatgatggaattgttatatgatacagcaccattgctacctaagacaaaaccacggtatcttatgggtgtggggact

SEQ ID NO: 7232 - DNA, 200 bp, Lawsonia intracellularis
ccattagatatacttaaaggtattgaggcaggagtagatatgtttgattgtgttttacctactcgtaatgcccgaaatggaacattgtatacttctcaagggaagttaaacataaaacgtaaagaatatgcagaagatgacttacctcttgacgagaactgtagttgctatacttgtcagaccttttcacgggcatattt

SEQ ID NO: 7233 - DNA, 200 bp, Lawsonia intracellularis
aagacatcttttccattcacaagagttattggcatttcgattgaatagtatccataatcttacatattttttaaatataatatttggagcacgaaaagctatacatggtggatatttttttaattataagcaacaggttgaacagctttattgtaattaatattctgtttttctgttactatctattagttatcctttat

SEQ ID NO: 7234 - DNA, 200 bp, Lawsonia intracellularis
aaattattatgatacccttttggaacaaattactaaaaaaattagtatgattttctagaaaaattataaactatttgttattatacgattacttacaagtttttcaagagcttgaagatagtttttagttctttttgagcgattataaaataatgattgaatttcactacgaagtgtttggaatattccttgactattat

SEQ ID NO: 7235 - DNA, 200 bp, Lawsonia intracellularis
tgggttgtggagaggatgttactaatgggagaaggagttgtataactttttttctttctttattaatacaagcttctgcaaaaggtaaaagatctggctcggcatcaacttctggatgtaagtaatcatcagagaaccattttatatttaaatccgcaaatagttcaaagctaatttcaataatgcgatttagccaacgt

SEQ ID NO: 7236 - DNA, 200 bp, Lawsonia intracellularis
atattttgtgtattcatatatggtaatgtcatttttagatcattccaatagtttttattaagataattaataaatggtttgatagcatttgcatctaataagatagattttacttctaaatagtgaactaatttttgttcaacaagtagttcgggcgatggaagaagatatttatgttcttgtctaatgaagtatagttc

SEQ ID NO: 7237 - DNA, 200 bp, Lawsonia intracellularis
atcaatacattgagaaaaaggtacatttgaacttagtacatcaaatataaagcatgtagatcctaaactaagtttaaagtttggatgtaaaaaaggtcttcctgctttgccattattcagaaatggaagagaaaaaatccagcgtcctattgtgttacattcccaataatcaggattttcacaaaaagttgtatggtgga

SEQ ID NO: 7238 - DNA, 200 bp, Lawsonia intracellularis
tttcatcatgtggattattggctctagtattaagtgttttatcagaaaatgttacagcattaccacataccaaaggaacattatcttgaattgctatttttaaaagttgttctgctgccattggagctaaaaaatcatcagcatcaatccatgtaataaaatcacctttagcaaggttttgtccaacttgtctggcaatt

SEQ ID NO: 7239 - DNA, 200 bp, Lawsonia intracellularis
ccagagcctttgtttggttgtgtatgatatctaatagtattcgtaatagaagaatagtgttcgataacttcttgggtattatctgtggagccatcatttacaataataacttcaatttttttatgtgattgccataagcaggattcaatagcaatgggaagccaataacccatattataaacagggataacaatagaaag

SEQ ID NO: 7240 - DNA, 200 bp, Lawsonia intracellularis
agtgggcataatcactccaataagtaattagagagttattcaaatgattattatggttaaaagaaaaaagcgcaattaaatatattaattgcgctaaattttataatataaagcttgttttattttacttcaacagtagccccagcttcagtaagttgttttttggcttcttcagcatcttctttagatacaccttcttt

SEQ ID NO: 7241 - DNA, 200 bp, Lawsonia intracellularis
tagggtagaaggtgctccgtctactttatcttttgcttcttttaatccaagacctgtaagtgctcgtactactttaataactgcaatcttgttagctccagcttctttaagaataacatcaaattcagttttttcttcagcttcagcttcagctgatgcagcagtaggcgctgccatcatcatcccaacagcaggagctg

SEQ ID NO: 7242 - DNA, 200 bp, Lawsonia intracellularis
ctgcagaaacaccaaatttttcttcaagttccttaataaattgggaaagttctaatactgtcatattagatataaattcaataacttgttctttggttacagacatggaattactcctctaaaatatgtttgcaattaatttaagttgtttgcctatgcagctttttttgcctcaatagcttgaagagcataaaaaagtg

SEQ ID NO: 7243 - DNA, 200 bp, Lawsonia intracellularis
gccgaattatattagcaaacagggatacaaaattggtaggcacagcatttaatgttccaagtgtttgagcaataagctcaggtttacttggtagtttggcaagatcttctatatcttttgttgtaagaagagttccttcaagactaccatgacgaacagtaataaacttactagtttttacaaagtcgttgatagttttt

SEQ ID NO: 7244 - DNA, 200 bp, Lawsonia intracellularis
gctattgccacaggttcattatagccaaatgcaatagcacaattgtctttgaactgatcttttataatgctatggataccatcggtgaatgctattcgtgccagtgtattttttacaacaagatattcaccaccgctttcacggagttttgctctcaggcacgttagctcttccaccgatatccccttaaaatctgtgac

SEQ ID NO: 7245 - DNA, 200 bp, Lawsonia intracellularis
tactacaaaagatgcagtatcagcttttgctttgatttgagaaatcagagcagctttttcagatctattcacgtgaatctccttcacgttatggggttactatggtggaatagcaagccaaaggtgttgtctagacaggttatttaaggaagtttccacctgttgtcttcgactcgaattccagtccttagccaaccatc

SEQ ID NO: 7246 - DNA, 200 bp, Lawsonia intracellularis
ttagttgtaagatggtactttttcatgaaaggttaactttcaagaaatttttttacaagattggtatctattttaaatcctggtcccattgttgtagatatagccatactttttatataagtgccttttgctgaggatggcttaagacgattcactgtttctacaagagactttagattaccaagaattttttctgaacc

SEQ ID NO: 7247 - DNA, 200 bp, Lawsonia intracellularis
aaatgaaactttacctagtggtgcatgcaaaacacctgctttatcaactttgaaatcaatacgccctgctttaagttctttaatggcattagtaacgttgaaagttacagttcctgtttttgcattaggcataaggccacgaggtccaagttgacgtccaacttgtcctacaagagccataacatcaggggttgcaacag

SEQ ID NO: 7248 - DNA, 200 bp, Lawsonia intracellularis
ctgcatcaaaatcaagccagccatctttaatttttgctacaagttcttctgcaccagcatagtcagcaccagcttcttttgcttcagcttctttttcacctttacaaaaaacagctactcgtactgtctttcctaacccatagggtaaagtaacagcaccacgaaccatttgatcagaatacttaggatctactcctagg

SEQ ID NO: 7249 - DNA, 200 bp, Lawsonia intracellularis
ccaatagcaatatctacagtttcatcaaaatttgcaaaagaagtttgtattgattgagttacagcatcttcaaaagaaaggtgtagtgataagtctactccttttactgcattacgatattttttccctagcttgggcattactatattccttttataaaagaggtcttactatcatctattccctatattgggatgaaa

SEQ ID NO: 7250 - DNA, 200 bp, Lawsonia intracellularis
tgttgatgtgttaagaaaaatagtcagttaactttaactttaatttattttatttcaattcccatactacgagctgttcctatgattgaacgtttagctgaatcaagatcttttgctgtaagatctggtagtttgagttttgcaatttcttcaacctgttctatagatattttccctactttattacgattaggttcacc

SEQ ID NO: 7251 - DNA, 200 bp, Lawsonia intracellularis
agatcctttatctattttagctgctttcataatgagaacagctgcaggaggtgtttttgtaataaaagtaaaagaacgatcagcataagcagttataactacaggaataatcatgcctttttgatcttgtgttcgagcattaaattctttacaaaattgcataatatttaacccatgttggcctaaggctggaccaacag

SEQ ID NO: 7252 - DNA, 200 bp, Lawsonia intracellularis
gaggtgatggatttgctacacctgctggaatttgtagttttattttagcaagttcttttttagccattgtttttataacctctaatttgactagagtgttatagaacctatgctaattgcataagttctatctatatattttatctttaccccttagaaacttggataaaatcaagctcaacaggggtttgtctaccaaa

SEQ ID NO: 7253 - DNA, 200 bp, Lawsonia intracellularis
aattgatacagaaactcgaagtttccctttatcgtaattgacatcttcaacaataccgttgaaaccaccaaatggtccatcaataacacgtatttcatcaccacgttcaaagctaaatttaggccgtggttgttcttggcgtgtttccatgagtgaaaggatctttgaagcctcttcatctttcattggtgcagggcgat

SEQ ID NO: 7254 - DNA, 200 bp, Lawsonia intracellularis
ttttccctccaacaaacccagttaccttgggtatagtttgaataaggtgccaagaataatcagtcatagtcattcgaagcatgatgtatcctggatagaatttacgtgtagtcgtacgttttagaccacctttacctaactcaacgactcgttcagttggtaggacaacctcatgaataagaccttcatcttgtccacta

SEQ ID NO: 7255 - DNA, 200 bp, Lawsonia intracellularis
cgcatcatttcttttatagtggcttccacacgttgttcaaatcctgaataagtatgaacaatataccatcgagactttcctggatcagctgttttattagcttgagcaagaggttcattatgttcagtcatgggaagtcctaaaatttaaggatatatgcaatagtttttgataggcctagatctactaatccaaggaat

SEQ ID NO: 7256 - DNA, 200 bp, Lawsonia intracellularis
attgacatgatagaaacaaaaaccaatacaataaggcttgttgtttttgtctctttaaatgtcggccaagtaactttttttaattcaaaataagaaagttcaagatagtttttgaaccaaataatgtttctaaaaaaatttttgtgtgtttcttcttgagtagactctttctttttcatacagttatcctagaaaaataa

SEQ ID NO: 7257 - DNA, 200 bp, Lawsonia intracellularis
aaaaccaaatggcagggcaggagggattcgaacccacaacatccggttttggagaccggcgctctagccgttagagctactgccctgcaaactaaataatacattatttggtttcacggtgaactgtatgttttttatcccaagggcaatattttttcagttcaacacgggcagtattggtccgcttattttttgttgta

SEQ ID NO: 7258 - DNA, 200 bp, Lawsonia intracellularis
gcataattacggcgtttacattcagtacaagcaagtaatatattaatacgcatgagttttgtttactccacaatttcagtcactacaccagcaccaacagttcgaccaccctcacgaatagcaaaacgtaaaccttgctccatagctattgggtatataagttcaacattaaaagttgcattatcaccaggcataaccat

SEQ ID NO: 7259 - DNA, 200 bp, Lawsonia intracellularis
ttcaactccttcattaagagtaataacgcctgttacgtcagttgtacgacaataaaattgtggacgataacctgagaaaaatggtgtatgtctaccaccttcttcttttgaaagtacataaacttcagctttaaacttacgatgaggtgtaatggattttaatgcagagagtacttgacctcgttctacttcatcacgtt

SEQ ID NO: 7260 - DNA, 200 bp, Lawsonia intracellularis
ttacacttcttagaagaactccaatgttgtcacctgcttctccctggtcaagaagtttgcggaacatttcaacacctgtgcaagtagtttttatagtgggtttaatgcctacaatttctatttcttctccaactttaatgacacctctttctactcgtccagtaactactgtaccacggccagaaatagaaaaaacatct

SEQ ID NO: 7261 - DNA, 200 bp, Lawsonia intracellularis
tcaataggcataaggaatggtttatcgatatcacgttgaggatcagggatatagctatcacatgcatcaaggagttcaaggattggtttagcatcatcgctatctgcgctatctgagtttagcgccttcagtgctgagccacgtataacagggacgtcgtctccagggtatccatatgtacttagtagttcacgaatttc

SEQ ID NO: 7262 - DNA, 200 bp, Lawsonia intracellularis
tagttcaacaagttctagaagttcaggatcatcaaccatgtcacatttattcataaagacaacaagataaggaacgccaacttgacgggcaagcaaaatatgttcacgtgtttgtggcataggtccatcagttgcagcaacaactataatagcgccatccatttgtgcggcaccagtaatcatatttttgatataatcag

SEQ ID NO: 7263 - DNA, 200 bp, Lawsonia intracellularis
catggccagggcagtcgacatgagcataatggcgttttggagtttcatattcaacatgagctgtagcaatagtaatcccacgctctttttcttcaggggctttgtcaatctcgtcatatcctacaaattttccacccattttcatagaagctacttttgtaatagcagctgtaagcgtagttttaccatggtcaatatga

SEQ ID NO: 7264 - DNA, 200 bp, Lawsonia intracellularis
ccaattgtaccaacattaacatgtggtttattacgtgtaaatttttccttggccataactgtctcccttcattagttgcgtcttaaatctagctaatattagagtaaaaagtaaaaaacattgttatagttttgtataatatatagtggacattttgtcatccagtattaatgaatacggccaaaaggagcagagtcata

SEQ ID NO: 7265 - DNA, 200 bp, Lawsonia intracellularis
tttggagcgggaaacgagattcgaactcgcaaccctcagcttggaaggctgatgctctagccaattgagctattcccgcttaatgtgccgtagtcccctggcagatattgtgtctcctacagccgtgtatctaactctattacatagttcttgtggtggagggagaaggatttgaacctacgaagtcttacgacgacaga

SEQ ID NO: 7266 - DNA, 200 bp, Lawsonia intracellularis
tttacagtctgttccctttagccacttgggtatccctccatatggagctggtgatgggacttgaacccgcaacctgctgattacaaatcagctgctctgccaattgagctacaccagcaacaggataagctatttacctattctttttgagattggcaagtaaaaaatatgttaattagcaatctactatttaattttta

SEQ ID NO: 7267 - DNA, 200 bp, Lawsonia intracellularis
tatttttctcctaaacaataatagtatatttttaatattaaggcaatattttaacgatataaggtttttcgctaaggagatatcgttgagctaattcttttatctgttgggcagttacatgtgttgctttttttacttgttccatagcatagttaagtggtctgttttctaatgtaagcatagcagcttcacttgcacga

SEQ ID NO: 7268 - DNA, 200 bp, Lawsonia intracellularis
cttccaagactttgtctttctctatagtattcgccttcaatttgattttttgctctattaagttcagtttctggaagaagtttgtctataagagattgttgtatggtatctttgaatcctttttcagcaacagatattttgtttggttctgtaccaatatagaggcctaaatagccagtttctgtcgtttgtctattaaa

SEQ ID NO: 7269 - DNA, 200 bp, Lawsonia intracellularis
tgctgtaacagtatatccaagtgcttgttcatcacgtagatcacggaagaggagtcctccttgaccactaagaattgtctccataacattaaatataggtgtttcaggatttgtatcagggactgttttataaataagtaataagtgagcttgatttcttcctgggatattaatatcaagctctctttcttttccccaac

SEQ ID NO: 7270 - DNA, 200 bp, Lawsonia intracellularis
taggttcaggtactactattttgtcttcgataggttcaggtaagtctcttacaaattgtaaaactttttcacgatcaaattgtcctgcaatagcaagtacccatggttgagctatttgtttttcccaaaattttttaatgtcttgttgtgtaaatttttttattacttccggatttccaagttgcatatagccatatacg

SEQ ID NO: 7271 - DNA, 200 bp, Lawsonia intracellularis
ctatggggaaagagaaatggaggagtttttctaaacgctaaacctagtggttgatcttcttgtgatttaatagcagcaagttgatcttgaatcccacgagatacttctggttgaaaaaaaactggatttttaattatatctaatactagaggaaatagttcattgttaaattttgatggtcctgtaaaggtaacagaaaa

SEQ ID NO: 7272 - DNA, 200 bp, Lawsonia intracellularis
tgtctttctaccagctgatgcagagagatcagctgctctatcagctagaaaattttgaatttctattacagttttgttagatgttccttttgttagaattgttgctgtaagagatggtaatccttgttgttcatcagagacaagagcatctcctcctgaaaaaaggagtgtaacagaacagtatggtaatgtattatctg

SEQ ID NO: 7273 - DNA, 200 bp, Lawsonia intracellularis
gaataagaacaactgtcttttttcctaatttaacaatttcttctttattgttagattgatttactacagttgcttcttcatgttttttaggccagtttttttctaatgttgcttgtagattaggcataggaacgtctttaggaggaagaactacagcagcaaatctttctggacgaatccatttagaaatagcttcatca

SEQ ID NO: 7274 - DNA, 200 bp, Lawsonia intracellularis
agcatatctatatctacactctgaatagcttcaattgtatttttttctccttcttcaccatttaagaaaaattcaaaataaccaagttttgaagcaaggcctgggagtgtttcttttgtacgataaagattatcttctaagttaagtttagcacgatcaagttcttgttgagaaaactttttagcactaagattagcaag

SEQ ID NO: 7275 - DNA, 200 bp, Lawsonia intracellularis
atcttttgtcaatgtatcccaaaatggtcttattttgctaatttctacttcagctgtgattaagaatactcctgtgcgttcaaaagaataatttgtaacttggatatcttcaactaattgtttttcatgtttgtatgtacgataaaataagctagttttatcaccaccaagaagttgtgcaaggacatcaagtgtattgg

SEQ ID NO: 7276 - DNA, 200 bp, Lawsonia intracellularis
attcaatattaagtgcgtttgaaacaggaacagcagctgtaagatagattttattccatgtcccaggaataatagttacagtcccttgtccttctttaagaggaagttcttctgcataatatggtaaaggtaatataatattttgtgtattattatacttactaaatagatgatttgcttcttgcagtacttcatttgcc

SEQ ID NO: 7277 - DNA, 200 bp, Lawsonia intracellularis
ttaacatctccaacaacgacaagaagcatgtcttgtggctgatagtgtgtagcaatataatcctttaagtcttgagaagtcacagcattaattgtttcaggataaccaatgattggtctagaatatggcgttcctgcaagactttttgcaagaagttttttaaaggcaaatgaatgaggattatcttctcctcgtgcaag

SEQ ID NO: 7278 - DNA, 200 bp, Lawsonia intracellularis
ttcagctaagataacttttttttcagattcaagatcttgaggatcaagcataggatgaaatgccatatctctcacaacatccatacctaacttccattggctagatggcatatcagttttatatacagtataatcataacttgttgctgcattcagatagccaccaactgcttcaacttcttgactaattgttgcatttg

SEQ ID NO: 7279 - DNA, 200 bp, Lawsonia intracellularis
gacgagattctgttcctttaaaaaccatatgttctaatatatgactgatcccagattgttctggtttttcatatgctgaaccagtatgaacataaagtcttgtagagacaagaggaaagcgattatcttcaagtacaagaactgtaagtccattacataatcgtgtaacaataggatgtttttttgtaagattttcaggt

SEQ ID NO: 7280 - DNA, 200 bp, Lawsonia intracellularis
aaaatatcatttgtctttatgattgatgaggttgcctctaaaggttgaaccatataagtggccataaatactcctaataggaaaatagagaagataaaaaatagtcgttttttcatgaattgagttttctttttattattagaagcataaattgaattttgtggcatagatggttcctttccaggataaaaattttttat

SEQ ID NO: 7281 - DNA, 200 bp, Lawsonia intracellularis
aaaataacgcataacgattataatgacaagttacatctaaaatatatacttaaaaagtaattaaaaaacagtacgttgtactaaaacataattgttgaaaaaataaggaagagcagccgtgtttagcttagaaaaaaataaggtgttgtctgagttaattagtaaacatatagataaaattgcattagaagagagattaa

SEQ ID NO: 7282 - DNA, 200 bp, Lawsonia intracellularis
cctctgagcaaattaatttaggaatttgttctggtacaatggttttattaggtaacctaaaacatagtgatgttaagccaacacttataggacagcctgcacgtattaaggtgaatgcaaatattggaacctctccattagaaagttcttttaacaaggaaatggataaacttaaagtagcctatgaagcaggtgccgat

SEQ ID NO: 7283 - DNA, 200 bp, Lawsonia intracellularis
actgttatggatttatcaacaggtggtgatttatataagataagagaagaaatgcttgcaggaacttcattaccccttgggacagtccctttgtatgcagttgcccaaaaatatatcaaaaaacattctgatccagcaaagatggatccagaagagctttttgaagaaattgagagacaagcagatcagggggtagactt

SEQ ID NO: 7284 - DNA, 200 bp, Lawsonia intracellularis
tatgacacttcattgtggagtgacatataaggctgcagagttaggttctcaaaataatcgtgtattaggaattgtctctagaggtggagcccttttagctcgttggatgtttaaaaataaaaaagagaatccactatatacagaatatgatcgactattaaaaattgcttctaaatataatgtaactatttctcttggtg

SEQ ID NO: 7285 - DNA, 200 bp, Lawsonia intracellularis
atggacttcgacctggaggggggtgtgacgctggtgattctgcccaatgggaagaacttatggttcttggagaactcacaagacgtggacaacaagcaggtgttcaatgtatgattgaaggccctggtcacgttcgtttacatgaagttgaagcacaagtgataagtataaaaaagcttacacatggtgccccattatat

SEQ ID NO: 7286 - DNA, 200 bp, Lawsonia intracellularis
gtattaggaccgttagttattgattcgtctccaggatatgatcatatctcaggtgcaattggtgctgctgtttctgttcgtgctggtgttgactttttgtgttatctgacaccagctgaacatctctcacttcctaacaaagatgatgtttatcaaggagttatggcttcacggattgcagcacaggctggtgaagtgtc

SEQ ID NO: 7287 - DNA, 200 bp, Lawsonia intracellularis
tttagggcgtcctttagctttggaaagagaagcttgtataagcgaaagtcgtaagaaacttgattgggatggtatgcggaacgcagcccttgatgctaatgctgtagatttacgtcgagaacctcataagaaagaaaaagtatgttctatgtgtggagatttttgttcaatggatatgttaaatgataaatggtaatagg

SEQ ID NO: 7288 - DNA, 200 bp, Lawsonia intracellularis
ttactattataatttattattatgttaaattaatataacaagataaagttattatgtaatttctataaataaattctttctgccagactatgctatatttctggcagattttttatgtatattttgatttttctaacaatatttttttattatttatttagtactatcttttgttttgggacaacctgagcatacacttt

SEQ ID NO: 7289 - DNA, 200 bp, Lawsonia intracellularis
tttgttcatatggaacaggatattctccatttagacatgcaaggcagtagttattagaagtagatacagatttcagaagaccttcaaggcttaaataataaagtgtatctaggtgaagtaagttgggaagatcttcaataggatgttttgctgcaatgagttctccttttgatgaaaagttaatcccataaaaacaagga

SEQ ID NO: 7290 - DNA, 200 bp, Lawsonia intracellularis
aaacgtaatggaggacagcttacacggaaatggatttcagaagcttttaattcacgtagtttttttactcttgtacttacagtggttcctcttacaatggaatcgtctataatacacaatcgtttattagcaatcattgagcgaacagggttaagttttatacgtacaccaaaatccctaatattttgagaaggttgaat

SEQ ID NO: 7291 - DNA, 200 bp, Lawsonia intracellularis
aaaagttcttccaacataatgattgcgaatataagcttgctcatatgggattccagatgcttgagaaaatcctagagctgcatacactccagagtcaggaaaaggcataacaagatcagcgtgtgttttacattcattagagagctcaatacccatgttttttctgcaatgatagacatcttctccaaagacaatagagt

SEQ ID NO: 7292 - DNA, 200 bp, Lawsonia intracellularis
caggcctagcaaagtaaataagttcaaaaatacattgacgagtaggtacgttttttgagtgtagaaggggtacagatgtaacatgtccttcatcaataataaccatttctcctggcttaatatctcttataagtgtaatatctaaaagatcaaaagcacaactttctgaagcaagagcatatgaatcttctattttccct

SEQ ID NO: 7293 - DNA, 200 bp, Lawsonia intracellularis
aaagtaagtggtctaaatccatgaggatctcgtatacctacaagcttatttcctacaagaataactagtgaataagctccttttacttgtgtgcaggaatataatatagcttcttctatacttctgtttgtaaggttgtgtgcaataaggtggagaaaaatttcactatcactatttgtctgaaaaatagcaccatcatt

SEQ ID NO: 7294 - DNA, 200 bp, Lawsonia intracellularis
ttcaagttgttttcttaactgcattgcattagtaagatttccattatgtgcaagtgctagttctatatcacaaatacgtacagatattggttgggcatttcttctggatgaaataccagtagtagagtatcttacatgcccaatagcatagtggccttttaattctttacttagaatatcttcactaaatacatctggta

SEQ ID NO: 7295 - DNA, 200 bp, Lawsonia intracellularis
caagtcccatatctacatatgatgtaatattattaccattatatgatgcaatccctgcactttcttgtcctctatgttgaagagagtaaaggccaaaatatgccatacgggctgcttcttcatgattagttataccaaatactccacacatttttttaccttaataaacagagttaggggaatgagataggggtaacatc

SEQ ID NO: 7296 - DNA, 200 bp, Lawsonia intracellularis
cattattaactgatatagttattatattacaaattataatattcttgaatactttttacctgaataggagtatctcttgaagcttggatagctcgtgcgatagcttttgctccggcaagtgttgtgctatatgggatattatattgtaatgtggcttgtctgatagttctagagtcattagttgtttgttttcctgatgg

SEQ ID NO: 7297 - DNA, 200 bp, Lawsonia intracellularis
tgtgtttataactaaagcaatatcgccattttttataagatctataatattaggtcgtccttcatataccttaagaacatgttgtacaggaatgttatttttactgagtagtacagcggttcctgatgttgcaataagttcaaagcctagttggagatattgtttagctatatctataagaagaggcttatctctatcat

SEQ ID NO: 7298 - DNA, 200 bp, Lawsonia intracellularis
taacagaaaaaaatactttacctgtacttggtaggtactgtcctacaccttgctgtccttttaaaaaagcttcttcaaaggttgaagctattcccataacttctcctgtagatttcatttcaggccctaatacaatatctactccagggaagcggtgaaaagggaaaacagattcttttacagaaacatatcctgttttt

SEQ ID NO: 7299 - DNA, 200 bp, Lawsonia intracellularis
tctatagcccaaggattgagctctttaagacttactccaagcataacttgcattgctaggtaaggaaggggtactcctgttgctttggagacaaatggagttgttcttgatgctctagggttaacttccaatatataaataacattatcttttatggcaaattggatattcatgagtccaataacttgaagttctttggc

SEQ ID NO: 7300 - DNA, 200 bp, Lawsonia intracellularis
aagagctgttgtttgactttttatgtcttctattaattcttgggataatgagtggggagggataacacaagatgaatccccagagtgaatgcctgcttcttcgatatgctccattactccagcaatatatacattagttccatcagagagagcatcaacatccacctcaatagcatattcaaggaattgatcaataagta

SEQ ID NO: 7301 - DNA, 200 bp, Lawsonia intracellularis
ttggtcggtctaaattacagtcttttccatatagagaaaagtagtgtataagctctttttcttcgtaaataatttgcatagctctaccgccaaggacatagcttgggcggacaactatgggatatccaatagttttggcaatagaagctgcttcatttatagaagttgctgtaccatttgcaggttgttgtagttttaat

SEQ ID NO: 7302 - DNA, 200 bp, Lawsonia intracellularis
ttttggagtaatgcttggaatcttgatcgattttctgctctatctatagcctcagggcttgttcctagaattggtacgccagcacgaacaagtggtaatgcaagattaagaggagtttggcctccaaactggacaacaacaccatctggttgctcctgagcaataatattcattacatcttcaaatgttagaggttcaaa

SEQ ID NO: 7303 - DNA, 200 bp, Lawsonia intracellularis
gtagagtctatcagaagtatcataatcagtagatactgtctccggattggagttaatcataattgcttctatattactatctttgagagcatatgctgcatgacaacaacaataatcaaactctattccttgaccaattcgattgggtccaccaccaattataataacttttttctttttttctaaagagagttcttttg

SEQ ID NO: 7304 - DNA, 200 bp, Lawsonia intracellularis
ctgactcataggtagaataataataaggagtgaatgcttcaaattctgcagcacatgtatctacaagatagtatgttggaactatatctagttcttttcgtaagttacggatgtcagattctggtcgttcccaggctatagcaagctgtttatcagaaaatccaaactgtttagctttaagtaataaaggccttagttca

SEQ ID NO: 7305 - DNA, 200 bp, Lawsonia intracellularis
ggattagaagcagttattgtattagatagtgcaaagttatgaagtatcaactccatttctatgagttctttgaattgatacaaaaaccatggatcaatatgtgtaagagtatgaatatggtttaaactcattccagaagataatgcttgatgaatagcaacaatacgtaatgaattagggtttcttaaaagtataggaag

SEQ ID NO: 7306 - DNA, 200 bp, Lawsonia intracellularis
ttcttcttctgtaaatgtatagttagagctattaaatccaggaagaccagtttcaagtgatcgtagtcctttttgaaaagcttctttaaaagtacgaccaatggccattacttctccgatacttttcatggacgttgttaattcatcttttgcaccaggaaacttttcaaaagtaaatctagggattttaacaacacaat

SEQ ID NO: 7307 - DNA, 200 bp, Lawsonia intracellularis
aatctattgctggttcaaaagctgctgaggttttatatgtaatatcatttcttagctcatcaagagtataacctactgcaagttttgctgcaattttggcaataggaaaacctgttgcttttgaagcaagagcagaagatcgtgatacacgtgggttcatttctataacaacaagttctccatttttaggattaacacca

SEQ ID NO: 7308 - DNA, 200 bp, Lawsonia intracellularis
aattggatatttgatcctcctgtttttacaccaatttcacgcataatagctatggaggcattacgcattttttggtattctatatctgaaagcgtttgtgctggtgcaacagtaatagagtcgcctgtgtgaatacccatagggtcaaggttttcaatggaacaaataatgatacaattgtcagctgcatcccgaacaac

SEQ ID NO: 7309 - DNA, 200 bp, Lawsonia intracellularis
ttccatttcaaactctttccatcctatgacagattgttctatcattacttcatttgtgggactagcagtaagtccttgtattgcaattagttcaagatcttccatgttataagcaattcctccacctgtacctccaagtgtaaatgcagggcgaacaataacaggaaatgggatatttaatgcaatttgatggacttctt

SEQ ID NO: 7310 - DNA, 200 bp, Lawsonia intracellularis
cgatagtttttgcaatagcactagatggaactttaaggccaatattttccattgattgtctgaatttttcacgactttctgctttttctatgacatctgcgcttgctccaatgagttctgttccacactcatgaagtattccagatttagccaaattaagtgctatatttaatgccgtttgtcctcctagtgtaggaagt

SEQ ID NO: 7311 - DNA, 200 bp, Lawsonia intracellularis
aatgcacatgggcgttctttccgaataattgcagtaactgtttctaattcaagaggttcaatataagtatgatttgcaagggttggatctgtcattatagttgctggattagagttgacaaggacaacattatatccctcctccttgagggctttaatgccttgtgtcccagagtagtcaaactcacatgcttgaccaat

SEQ ID NO: 7312 - DNA, 200 bp, Lawsonia intracellularis
aatgatggggccagaaccaataaccataattttttttatatccgaacgcttaggcattataggattccttactttagtaaaatatagataaggccttttctactacacatcatttttcccccttgcaagaaggttttcgttcagatgaatttgagatagaaaggtatagttaattgatatatgagctaaggagtagagca

SEQ ID NO: 7313 - DNA, 200 bp, Lawsonia intracellularis
atggctgatcaatgtaagtgtcctcattgtggtaattatataaaagaatacaaaaatcctcttccagctgtagatattattatttatagtcctgatcatggcgtgatagttatatcaagaaaaaatgagccattaggttttgcttttcctggaggctttatagagtatggagaaactgtggagcatgctgccataagaga

SEQ ID NO: 7314 - DNA, 200 bp, Lawsonia intracellularis
atcatatgaagaaacaggactgcaaattattttacagggtgttttaggggtatactctaagaaagatagagatcctagacatcacacactatcagttgtatttgtagcatgccctttagatattgaaaagcttaaggcaggtgatgatgcagctagtgcaaagtttttccttttaaatgatatgccagagcttgtttttg

SEQ ID NO: 7315 - DNA, 200 bp, Lawsonia intracellularis
atcataaaaaaatttttgaagatttcaattgttttttacaagggaagagaccactagcacctcttgtagaaccaacagaatagatactttttagtaatttaattattattaataaaaagtgaagagaatttttttacatgtattttataatactgtattgccagagttacctgatacattatcatttagaatgaatatat

SEQ ID NO: 7316 - DNA, 200 bp, Lawsonia intracellularis
gtttgattttaggtgattgcatataattttgagagagtatatgtattaaattaattgagtaaatttaaggttcctttaacagttagggattattaactagtctttgtttgtgaaaatataaccaaggggtttgagtttggatcgaagtacagagaaaaatttatggtcacgccttttaagtttttttcatggacgatcta

SEQ ID NO: 7317 - DNA, 200 bp, Lawsonia intracellularis
atgattctcttgaacaagccattttagaagctcgagatgatggagagttagatacagaagaaggaagtatgattcttagcatcctaaagtttgatgagttacaagtgcaggatgttatgatcccaagaacagattttgattgtatgccttcaggctcgccagtaagcgaagtagcaagttgtattgttgaaacaggtcat

SEQ ID NO: 7318 - DNA, 200 bp, Lawsonia intracellularis
tcacgaataccaatatataaagatacaagagataatatagttggtattgcttatgcaaaagatctcatagaattacttttagacccttcaaaacatcatacacctatagacacaacaatgcgtgaacctttttttgttccagaaacaaagcctgttagggaattattacaggagtttcgtacaaggaaaaatcatcttgc

SEQ ID NO: 7319 - DNA, 200 bp, Lawsonia intracellularis
tattgccattgatgaatatggaggtacttctggtttattaactattgaagatgttcttgaagaaattgttggggatattgaggatgaacatgatgctccaaaagaagaagatatccatgtaattggagataattgttatgagctatctggtagagcatatctagatgatcttctaaaattaggtattaaccttgaagcag

SEQ ID NO: 7320 - DNA, 200 bp, Lawsonia intracellularis
atgaggttgatacaattggtggctatctttcacttgaagcaggacacgttccagagcagggcgaaacttttgaatttgatggttggaagtttgaagttacagaagctgatgcaaaacaaattcgtaaagtgcgagtggaaaaattacttgatgaatttagtagtaaagaagaaaataattaaaaaaattgatacctgctt

SEQ ID NO: 7321 - DNA, 200 bp, Lawsonia intracellularis
aactatactatttaataagattttatatataaagtagaataatggcttttagtaagatacttgactttagatttgaagagggttattggcaaactctttctctgttagttatttcataatttttattttaattttgttgtggaggaattctatgccaactatcaaccaacttattcgccatgagcgaaagaaggttgtaa

SEQ ID NO: 7322 - DNA, 200 bp, Lawsonia intracellularis
aacgtaaaaaaacacctgcacttcaagggtgtcctcaacgcagaggtgtttgtactcgtgtatatacaacaacacctaaaaagcctaactcagcactaaggaaagttgcacgtgttcgtttaactaatgggctagaagttacagcttatatccctggtgaaggtcataatcttcaagagcactctgtagtgcttattcgt

SEQ ID NO: 7323 - DNA, 200 bp, Lawsonia intracellularis
ggcggccgtgttaaagacttacctggtgtacgttatcatattattcgtggtacacttgatacctctggtgtgcaagatcgccgtcagcgtcgctcaaagtatggtgcaaagcgtccaaagtaatatagagctatttgttttgtatcccaatgggaatattattatttaatagtttaatactacctaatatgattaaaaaa

SEQ ID NO: 7324 - DNA, 200 bp, Lawsonia intracellularis
tcatgtttataaaacttataactagttaaaaaacattttactgccttgtggagaatataaatgcctcgtaaaggtcctgtccctagaagagaagttttacctgaccctatttataatagtcgacttgctagtcgttttgtaaatcgccttatgtatgatggtaagaaaggtgttgctgaaaaaattttttatggtgctct

SEQ ID NO: 7325 - DNA, 200 bp, Lawsonia intracellularis
tgaaaatctttctgagaaaacgggggaagaaccccttcgtgcctttgagcgtgctctagacaatgttaaaccacaatttgaagtgaaagcccgtcgtgttggtggtgcaacatatcaagtccctatggaagtgagatctgataggcaaatttctctctctatccgttggttaattacttatgctcgctcacgtggtgaaa

SEQ ID NO: 7326 - DNA, 200 bp, Lawsonia intracellularis
aaggtatggttaataagcttgcagcagaatttcttgatgcttttaataatcgtggtggtgctgttaagaaaaaagaagatactcaccgtatggctgaagcaaacaaagcctttgcacattatcgttggtaagttaggagagatatagtgtcacgaacagtccctatagagaagcagcgtaacattggcattatggcacat

SEQ ID NO: 7327 - DNA, 200 bp, Lawsonia intracellularis
attgacgcaggtaaaacaacaacaactgagcgtattttatattatactggagtatcgcacaaaattggagagacacatgatggtgcctctacaatggattggatggagcaagaacaagaacgtggtatcactattacttcagctgcaacaacttgtttttgggatggttatcgtattaatattattgatactcctggaca

SEQ ID NO: 7328 - DNA, 200 bp, Lawsonia intracellularis
tgtagactttacaattgaagttgaacgttctcttagagttcttgatggcgctgtagctgtttttgatgctgttgcaggagttgagcctcagtctgaaacagtatggcgtcaagcaaataggtatggtgtccctagagtctgttttgtaaataagatggatagaataggggctaattttttccgatgtgtagatatgattc

SEQ ID NO: 7329 - DNA, 200 bp, Lawsonia intracellularis
aagaacgtttaagagcaaagcctgtttgtctacaacttcctattggtgctgaagataactttgaaggaattattgatttaatacatggggtttccttaaagtttgataaggaaacaaaaggccttgaagttgaaaggggtcctatccctccagaattaatggagttataccaagaaaaacgtcttgaaatgatggaggca

SEQ ID NO: 7330 - DNA, 200 bp, Lawsonia intracellularis
gcagcagaagaagatgaggtattgcttgctaaatatcttgagggaacagagcttacagcagaagaaattatagcttgtatacgtaaagccacaattgaacagaggcttgttcctgtactatgtggttcagcttttaggaatataggggtacaacctttacttgatgctgttgttcagtatttaccctctcctcttgatat

SEQ ID NO: 7331 - DNA, 200 bp, Lawsonia intracellularis
tccacaaatggtaggtcataatcctaatagtcctgaggaggaaatagtttgtcactgctcagataaagagccattagcaggacttgtttttaagttggcctctgatccttttattggtcatctttctttcttccgtatctattctggatttgttgagtctggaatgactgttcttaatacaactacagaaaagagagaga

SEQ ID NO: 7332 - DNA, 200 bp, Lawsonia intracellularis
gaattggacgacttcttaaaatgcatgccaataagcgtgaagatattaaatgggctggagctggtgatattgtcgctttagtaggtttaaaacaagcttcaacaggtgatactctttgtgatgaaaagcgtccagttattcttgaatctcttgatattccagagccagttattgaagttgcgatagagccaaaaacaaag

SEQ ID NO: 7333 - DNA, 200 bp, Lawsonia intracellularis
acagatcgtgatgctctttcaactggtctaaataagcttgcaaaagaagatccttcttttcgagtaaaaggaaacgaagagacaggtcaaacacttattgctggtatgggtgagcttcacctagaaattatcgttgatagattattacgagaatttaatgtaaatgcaaatgttggaaagcctcaagtcgcttatcgtga

SEQ ID NO: 7334 - DNA, 200 bp, Lawsonia intracellularis
aacaattactaagcctgggaagtctgatacaaaatatgctaaacaatctggtggacgtgggcaatatggacattgtgtcattgaaattgaaccaaatcctgggaatgggtatacatttataaattctatttctgggggggttatacctaaagagtatattcccgctatagataaaggtattcaagatgcattgaagtcag

SEQ ID NO: 7335 - DNA, 200 bp, Lawsonia intracellularis
gcatattagctggtttccctgttgttgatataaaagttaatcttgtttttggttcttaccatgaggtagactcttcagaacaagcattttatgttgctggctctatggcaataaaagatgctatgcataagagtaatcctatattacttgagcctattatggatgttgaagttgtgaccccagacgactatcttggagat

SEQ ID NO: 7336 - DNA, 200 bp, Lawsonia intracellularis
gttatgggtgatttaaacggacgtcgtggtaaagtccaatctatggaggcacgttctggagcacaagctatccgtgctcaagttcctctttctgaaatgtttggttatgcaacagagcttcgttcacgtacacaagggcgtgcaacttttagtatgcaatttgatcattatgagcgagtcccagcagccattgctgaaga

SEQ ID NO: 7337 - DNA, 200 bp, Lawsonia intracellularis
agttataaaaagtcggagttgataactataggttatcaaattaattttattattttttaaataaactgaagcatcttgtaaaaaatgctgcactagtattagcaatttctttttgtattaattgttttgtaacatcaagctcttttgaacacatttctggcagaacttgttctaagctttctgaacatggagaaataaga

SEQ ID NO: 7338 - DNA, 200 bp, Lawsonia intracellularis
gtagctgtagaagcttctgataatacaatcatttcataataagtagaaagctgcttttcaatatattgtgagtgatatttaggaggattaatataatcttttgttgcttctaccaaaagtattggtcttgataatgaagctaagctttctttagaaaaaaacattccaaaacctggagcaacaacaactatagctgttat

SEQ ID NO: 7339 - DNA, 200 bp, Lawsonia intracellularis
cctagggttattatatgtttcttgaggatcaatttgttgagcaagtatgttcatcttaggttttacccatgaagaacagtaagcatcgttgactattatggatgaagacggtaatataatattgttacaataatcccaccatgctgaaggatcaagttttgctcctcctaataaaagagctgcagttcctcctgtaccta

SEQ ID NO: 7340 - DNA, 200 bp, Lawsonia intracellularis
taccaataatacctattttttgtgtatcaagaatatcaaatagctcctgatcattcattaaaaaatctataataatatttaattggtgtacacggcctgtaatttgttttatagtaaacataagactcatatcatcagcattatcaccttgatgtgttacacttactacaatgtagcccttttgggttagtgttgtagca

SEQ ID NO: 7341 - DNA, 200 bp, Lawsonia intracellularis
agctcatgaagagaaaaccgagatccagcagagtcatgagataaaataatagcagggtatttacctggatatggctttgcaccatgtgaagctataatattccaatcaccatagtttatttgtataggtttttgtagagtgggataccaaatagctaaatcaagttttgtttgattattttcaatgcataaactttcaag

SEQ ID NO: 7342 - DNA, 200 bp, Lawsonia intracellularis
tcggattcctggttctatagaggcagcatggcttgtggtgtatgtaatacactccagtaatgttaataaaaagaaatataggaaaaaatgtagatgatgagtggtaataatgttaagataaatattaaagaattttttgtacattaaggtaagaaaactttataggttagaaggataatattctttttatacaagttgct

SEQ ID NO: 7343 - DNA, 200 bp, Lawsonia intracellularis
agagacttatgaaagtagttgctctttactattgttctatcccatagtgttaattagtttgtctaaaaacatacttaaaataacggatagaagaattcttgacaagaagagaaatatgggtaatacaccacagtttcttatgaaaaatatttttttagagtatggatggaggttttatcatgagcaccaataagattctt

SEQ ID NO: 7344 - DNA, 200 bp, Lawsonia intracellularis
gaaggtgcagttaggacaagtgagggtgtagagcttaaaggtgttattatgcaacctatcatagaaaaatgtgatggctgtggccatatccgtgaatttgaagaagagtcattttgtagtacatatcctattccttcaagaaaatgggctgatggccgttgtaattttgctactaatataaaaattgaggtaggtaaatc

SEQ ID NO: 7345 - DNA, 200 bp, Lawsonia intracellularis
tgctaaggttaatcctctgaaagcatcaaaacgtgctgctaaaggccgatagtaatttactatagattttttttagttaggaaggctgataagtcttcctttttattttatgatgaatagctatattgaatagtacttttttatagaagtaggaataagttataaaagaataatataataatatagctatggctactgtt

SEQ ID NO: 7346 - DNA, 200 bp, Lawsonia intracellularis
aattaacagttttttttagtaaattatatattttttcatcttagtgtacatattgcattgtagataacaagttatataagaatacattattcattatatatttttatttatattaaaaaatatagagataactttccttgttaactaactatattaaataaataaaatttttgaacatatatagtattataatattaaga

SEQ ID NO: 7347 - DNA, 200 bp, Lawsonia intracellularis
aatgttattagttacaaagtaaaaggtactagttagttagaaagataatcaagtattcaaagtaatattttagttatatacaagtaagaaatagtattttatttatatatagctgcatgagatattattgtaggattatataaaattttattctatttatagtatgtgttatatccaaaattatattgtactaggtaact

SEQ ID NO: 7348 - DNA, 200 bp, Lawsonia intracellularis
gacattaggtaaacaaataataattacctataatgatacatagaacaaataagattttttctatgtttaaagatgagaagagtgaatgaggacaacatttgattgtatagttgttggtggtgggcatgctggctgtgaagcttctatggctttagcacggttaggccaaaaagtacttttaattacaggtaatgttgata

SEQ ID NO: 7349 - DNA, 200 bp, Lawsonia intracellularis
gaataggacatttatcttgtaatccagcagttggtggtattgcaaaaggacatattgttagagaaattgatgctcttggtggtatgatgggtttatgggctgataaagcagggatacagtttagaacattaaacaggagtaaaggaccagctgttagagcaactagggcacaagtagatcgtgatttatatatgcaagct

SEQ ID NO: 7350 - DNA, 200 bp, Lawsonia intracellularis
gtaaaacaagatattttttctcaacctaatttatctgtttggcaagatacagttgaggctattattgtaaaagatggacatacaggaggtgttaaaacagcacttgggcaattatttaatagtcaatatgtcattcttacaacagggactttcctttctggattgatgcatataggacaaaagaatttttctggaggaag

SEQ ID NO: 7351 - DNA, 200 bp, Lawsonia intracellularis
attaggtgatgtaggaacttcaaagctttcatcatcacttcactctatagggttacatttaggccgcttgaaaactgggactactcctaggttacttaaaacgtctattgattttacatcaatggagatgcaattgggtgatacaccaatcccatcctttagcttccatggtccaaagccttctcaaccacaagttccat

SEQ ID NO: 7352 - DNA, 200 bp, Lawsonia intracellularis
gttatatcacttggacaaatgaatatactcatgatgtaatccgatcaggaatggatcgttcacctatgtttacaggtgttattactggaacaggggcacgttattgcccatcaatagaagataaagtcgcacgttttgcagatagagatcgtcatcagatatttgttgaacctgaaggattaactagtcaggagtgttat

SEQ ID NO: 7353 - DNA, 200 bp, Lawsonia intracellularis
attaatggaatttctacaagtttacctttagatatccaattagcattaatcgcaactattccagggcttgaaaatgcacatatggtgagaccaggatatgctattgaatacgactatgttgatcctatgcaattgcatcctacacttgaaacaaaggttctcccaggtctatggctagcaggacaaataaatggaacatc

SEQ ID NO: 7354 - DNA, 200 bp, Lawsonia intracellularis
aggttatgaagaagctgcaggacaaggattatgggctgcactgaatgtattctgtaaaattacacgacaagagccatttattttaggacgagataacgcgtatttagctgtattagttgatgatcttgttacacaagggacaaaagagccatataggatgttcacctctagagctgaatatagattgttgttgagagaag

SEQ ID NO: 7355 - DNA, 200 bp, Lawsonia intracellularis
caaatgctgatattagattaacaccattaggaagaaaaatagggttagttggcgactatcaatggaatttatttcaaaaaaagatatcagatatagatacacttgttaatagattacagaatattaggataaaaccagatacattggaccctagtatatttttagaattaggagaaagcattcctaatagggcatataca

SEQ ID NO: 7356 - DNA, 200 bp, Lawsonia intracellularis
ttagaggagctattaaaacgtccttctattacattccaaaccttgagaaaaatatattctgatttacctataacttcagaagatgtatatttagagactgaaactattataaaatatgctggctatcttgaccgtcaagaagaacttgtacagcggtctgcaaagttagaacattcatatcttcctaaagaaatagatta

SEQ ID NO: 7357 - DNA, 200 bp, Lawsonia intracellularis
tactaaagttgcaggactttcttcagaagttatagaaaagttacaaatagtaagacctcagacacttggacaggctggtcgtatttcaggagtaactcctgctgctattacatgccttgaaatatatttaaaaaagatacatgcttttagataatgtttgttattctttttaaagtagaaggaatagataatttatagat

SEQ ID NO: 7358 - DNA, 200 bp, Lawsonia intracellularis
ataattagagtgttaacttaaataagtttaataaacttaaagaaataaaagaattgttatctatctttgacttattgtttaatataatagacagttatataagttagctagattttttatatcattgtactatacattagttataactgcatatagataaatgaagtatgatgttagcctaacatttatcatgactcaga

SEQ ID NO: 7359 - DNA, 200 bp, Lawsonia intracellularis
tagatgcttataaaattttttgtttttatgaaaactaaaagatcttttcaacattattacttattagttttacttattacttatgttaactttttatttggatgttcttcaaaagttattgtaggaggaggttactcaaagaaaaatacactacttacacagcatatcgtaaaaactgcacagagtcagataggaactcg

SEQ ID NO: 7360 - DNA, 200 bp, Lawsonia intracellularis
ttatgtgcttggtgggacaactccaagaggctttgactgttcaggtttagtttggtgggcttataaaaaacatggggtatgtatcccaagattgactgaagatcaagcaagagcaggtattgctattaagttccatgctattaagcctggtgatattattatttttaaaacctgtaaaggaagaagtggtctacattcag

SEQ ID NO: 7361 - DNA, 200 bp, Lawsonia intracellularis
gactttatactggatgtggaagatttattcatagtcctagatcaggaaagcatgtacgtcatgataaaatagaaaatttatattggaaaagcaaactacacactatacgacgtattatacaataattaaaaatagttatagttaaaaagttttgattttgttatgttaactagctttttgttgttgaggaatagtacgca

SEQ ID NO: 7362 - DNA, 200 bp, Lawsonia intracellularis
ttggaaataagttacgatatagttgtagatattgctttaccattgttgtagttgtaaaattttcaaggctttttgtcccttcagatacaattttttcacaaagtcgtggttcttgcatacagcggatcatagccatagctagtgcaactggatcatttactggaacaagaagtccattaatttcatcttgaataagttca

SEQ ID NO: 7363 - DNA, 200 bp, Lawsonia intracellularis
gcatttgattctaaattagaagcaataacaggaattcctgttgcccaaccttcttttattgttgcattacttccctcaccctctactgagggtacaacaacagcatcagcaagaggtaaaattactcgactatcttgttgacctaataaagcaagttgagaagctacattaagttcaaatgcttcattaagtaatgattg

SEQ ID NO: 7364 - DNA, 200 bp, Lawsonia intracellularis
aaatagttcaccagagcctgcaatacgtacttcccatgggggcagatcttttgctttttttataatatgcatagcttggagtaaattactatatcctttttgactagtaagtgccccaatactttgaaaaacaaatcgcccatcttttctatcttttttaggatagtatagagatggatcaatacaagagtggatagtag

SEQ ID NO: 7365 - DNA, 200 bp, Lawsonia intracellularis
atactttattaggttcaatccctgattgaataactcttttacgtatttcttcactaacagtaacaatactatcagcaagtagatattttttcatccggctaccagtatgcagaggataagatacacgtctactgtgcattaggagtatattattaccatgtagtgccttactaaaggctcctaaagcagctgagtgtgcg

SEQ ID NO: 7366 - DNA, 200 bp, Lawsonia intracellularis
tcatttgtatggataatattaatagataatttccgaagggctttttctagttggaagagtattaatggatttgcagggcttctaccaagaaggggaataaaagggatccgttcttttttacaaactactgcaagagcgctagcttttggacatgcaataaaaggtactacatcagaatgttggagttcttgtgcaaggta

SEQ ID NO: 7367 - DNA, 200 bp, Lawsonia intracellularis
gtaaacttgccgttgtcctccacgtagttcaagtccaagatctaatagaagtacttgcataatttaacctaacaacaaaagaactatcccacaatataaacaagacatctataactcatattataattaacctatagcattgaccaccaaaatagtatactccatatttaacaggtaatacaagaaaaaacactgatcca

SEQ ID NO: 7368 - DNA, 200 bp, Lawsonia intracellularis
gctaactggatcagtgttaaggtattatttgcgataaatagttacgtcatcggcaactggaggctcacctttataggcttttacttttacttcgtctcctacttttagttcactgaaagatacatctttatcatcaaaaattgaacgttctatttcaaaatcgctttttctttcaactttgaatgagatggtttctccat

SEQ ID NO: 7369 - DNA, 200 bp, Lawsonia intracellularis
gtttgtttttaattgtaaacatttgttcttcttcattgactgatgttacagtcccttttgtacgaaacttatcactctttgcatcagagagagtataactaaccatgatcagcataaagcaagctaagaaggaagctaagatacgacacatagtcttctccttttagtggttaataggtataccatgttttaacaaggtc

SEQ ID NO: 7370 - DNA, 200 bp, Lawsonia intracellularis
tttttaagcatgtttcttaacatattgcttataggacctgttgttccattgccaatgatatgtccattatactttgtgattcctatacaaagatgtgttgttccaagaactaatatttttttagctgttaaaagttcctgttcagttatacactgtagttcaatcaatacagacggttttaacgcttcaattgttttttc

SEQ ID NO: 7371 - DNA, 200 bp, Lawsonia intracellularis
taatattgtttcaattaaaatgttttgaaattctaggaagattaaagtgttatcttgtgatacaatagcaatgttagcaatagctgactttgtgaagcaccattgttcattgaatgatagtgttagattgactttttgttctatggcttcaagttccataagaatacccaaaatataacttactgtttttatatttgtta

SEQ ID NO: 7372 - DNA, 200 bp, Lawsonia intracellularis
agaataagatagggtttgataggatattacttttacatgcagtaagtccatttttgtaccaactctccaatagttgtgttgtgttataaactacaatatacaaactagaatttggatattctaatgaactaatactaaaaccacctagtcctctaccaataaggacacgtatattaccctcatttttattaactgcttta

SEQ ID NO: 7373 - DNA, 200 bp, Lawsonia intracellularis
gcaacagtcataatgagttttttcaattttgaagtagaacatgggagagaaagttttaattttttgcttgaagtaactatacgctttatatgttccttcagctgaaggatatgatattccataatagatagtgtttcaaagacaccatctccacgatgaacaagatgagcatcaatagggattaccatttggtttggacc

SEQ ID NO: 7374 - DNA, 200 bp, Lawsonia intracellularis
atagtaaatatcttcagagctatggttataaaattcaagaagtttttctgctcctggacaaagttgatattgaatatggtctacgaaggcatttgtagctagtataggaagcatattatggtacctcttgatgactacctattaatatgtgaccgctagcaatactgatgtttactctgacacagtattatcattatagt

SEQ ID NO: 7375 - DNA, 200 bp, Lawsonia intracellularis
acatataatatgattaatacagtgtatattataaaccatataatataataagatatgttctagtaactatatttaaagtagctatggttaattgtttctaatgaagtatagggattataaaaaaagattgggattatcaatggttagcaagtcgttattaacaagatgttcagcaatttgtatagcatttaatgctgcac

SEQ ID NO: 7376 - DNA, 200 bp, Lawsonia intracellularis
cttttctaacattatcagcaacaatccataggttaagcccattatctatactatgatcttcacgaatacgtcctacaaaagttagatcttctcctgtagcatcaagaggagtagggtacatattctctttagggttgtcataaacacaaaccccaggagcttgagagaggatggcgcgagcttgttggggggttatttta

SEQ ID NO: 7377 - DNA, 200 bp, Lawsonia intracellularis
ttttccatttcaatatttacagattccgaatggccgtaaaaaacaggtactcgtacacaagttgcagtgactttgatagcaggatcatcaaatattttctttgtttcattagttattttcatttcttcttttgtgtagtcattatcaagaaagctatcaatatggggtatacaattaaaagcaatacggtgaggataaat

SEQ ID NO: 7378 - DNA, 200 bp, Lawsonia intracellularis
agttacttcaggttgttgtaggttaaaaatttggagagtttgtttttctatttcattgatacctttttgacctgttccagaaacagattggtatgtagaaactataatacgtttaatttttcctatattatgaagaggagctaatacaacaatcagttgaatagtagaacaattagggttagcaataatacctctatgat

SEQ ID NO: 7379 - DNA, 200 bp, Lawsonia intracellularis
tatccagtgtatgtgcattaacctcagggataacaagtggacatctatcgtccatacgccaatgactagaattatcgattactacacagccagatgaaacagcaataggagcatatttttttgatacttcacttccagcagagaaaatagcaatatctacatcttgtaagctttgatcagtaatttcttgtactgaaagt

SEQ ID NO: 7380 - DNA, 200 bp, Lawsonia intracellularis
tcatcagagttaaatggaatttttattcctactgattgtgaagatgcaaaaagttttatatcattaagaggaaagtttcgttcttcaaaaagtttaatacactctcttcctacagcgccagtggcaccaactatagcaattacaggttttttagacacaaaatacctcttcagagacaagtatgatgttattataaacta

SEQ ID NO: 7381 - DNA, 200 bp, Lawsonia intracellularis
cctttctttcttatatgccttttttctactgtcaagcattgtttttattcagttagattcttatttttaaaaataaacttcgaaattttaatatataatatataactatgcgatatgtatatttttttattatggatgttacagtatgcatagggttacagtgaaaagaataatagacatttaatatactatctaatata

SEQ ID NO: 7382 - DNA, 200 bp, Lawsonia intracellularis
taaaaaacatagttattggatgttattacttattagaagtattttataatcctcatctgtaatcatataatagaagggttgtcagtatgattaattgttcttatactgtataagacatgttttcagagaggggttctttttatagtatcctgaatgtaaggagtatatatggcaacatgggcccaaaatgaagatatttc

SEQ ID NO: 7383 - DNA, 200 bp, Lawsonia intracellularis
ctttgcgctccaaatcaagcagcttgctgatgaagagttacttgatttttgggaagaaactcaacaaatagagtctgcacttcgggctgaatatcaacagccagtggcacctgctcaagattatgaacgcctaattgttatggaattacaattgcgttcttgtcagagacaaggcatagaaggtatttagactaattatt

SEQ ID NO: 7384 - DNA, 200 bp, Lawsonia intracellularis
ttctatttgtatttagttagtaataagtatcacaaaaagagattaattagctattattttttatttatgattagctaatagctgttgagtagtttgtttcatttcaggtgtacttttgggattatctataacttgttgtagatattgtaacccctgatttttttcgtctaaatagtatagatagagcaatcctaaactat

SEQ ID NO: 7385 - DNA, 200 bp, Lawsonia intracellularis
actgcgctgatgggtcaggttctattataagtacttttttgaacgaattaacagcatcaatgtattcttcttgattatattgtgtaatacctaataagtaaagtatatctggattattaggctctactattaatgcatgtagaagaaaatattctgcttgtttccattcgcagagttctataaaatatttacttaattca

SEQ ID NO: 7386 - DNA, 200 bp, Lawsonia intracellularis
agtaaaatcctagcatcattaggatttgcttgtagcttttgtgtaagtgtgagtaagtctgtttgactagcattagttatatttttatcttgttgaatagcagaggcttcttgttgttcaatatgcattgtaagtgttggatgttcaataaaataggaagttgttccacaaataatagaaagagcacctactataattat

SEQ ID NO: 7387 - DNA, 200 bp, Lawsonia intracellularis
aagtaaaatatattgttgtttttttaatatagctcgtttactcattatctaagtattccatttttttaagacgtttttcaagtcttatctgtttatatccaataaaacaaacataactgcaaagtaatatccatattataatatttgtatacacaagccaatttatcataatcattttcctttccaaatttgtgtactag

SEQ ID NO: 7388 - DNA, 200 bp, Lawsonia intracellularis
taagagcagcaagtcgttctttttgtatatattgtttccctcgtatactaataatgcataaccagaagaatccaaaacatataatacatgcaataagcgtaagtttcatttctgaatctagtcctccattattagaggcaaaaactgtgggatgaatagagcgccagattctagcagaaagaaagactaaaggaacgtct

SEQ ID NO: 7389 - DNA, 200 bp, Lawsonia intracellularis
aaaaatgcaatgatacctaagacagagcatagtaaagaacgtcgctcttgaggaatatctaactgtcttaatactagataagcactgtaaagaaaccagaggactaatgcagttgtaagacgaggatcccatgtccaccaaacaccccaggattgtttcccccatatagaacctgtaataatagttgcactacttagaat

SEQ ID NO: 7390 - DNA, 200 bp, Lawsonia intracellularis
aacaccaatttcagctgttgcaccagataatgcatcccaataagtttttcgtgttttaagatatcctatacttgctatacagacgataaaaaaacttattagagcccaccaagcaagtggtagatgaaggtaaaagattttttggataattcctagttcactttcaataggtgcatagcagtaaataaggtattggcaaa

SEQ ID NO: 7391 - DNA, 200 bp, Lawsonia intracellularis
atgccattcctaatccactgagtgaaactaaggtatatagccatagtggcttcatatagtaaccttttttttaattataacaatattctttaatatcataacttattcatctcctaaagatataactgggaagagagcaagggctgatgcagcaaaaatagcatcaaaagctataacaatatgcatccatgaatacatag

SEQ ID NO: 7392 - DNA, 200 bp, Lawsonia intracellularis
cttctgtagactctgaagagagtgcatcagtacatgtatgaatacctgcaagaagaagaggaactacaagtggaaataaaataatggaaatgagagactcttgggtagattgcccttgagataagccccctattagtgaacctatagatacaagacctatattaataagaaatataatgagtagtgattgtgcccaacat

SEQ ID NO: 7393 - DNA, 200 bp, Lawsonia intracellularis
attccaggttcttgattaagaaaaacaacaattgcaggaataaaaataagttgagcaacagaaatgataataaaccctgttaaagcttttcctaaccaaatagcttgaacaggacatggtgtaagtaacagtcctgaccatgtatcactttttttttcaatatgatagagaatattaaatgtaagaacctggcaaaagat

SEQ ID NO: 7394 - DNA, 200 bp, Lawsonia intracellularis
agaagctaaccagaagatggtagctgctgcttgagctgttatattttcatctaatggttttgataaactaaaaataaaaatgagtaataatcccagaagtaatgcctgtatgacccctatacctctagagaacagaagttttatatctttttgtgcaatgataatagcatgagtaaacatagagtaacaatcatccttta

SEQ ID NO: 7395 - DNA, 200 bp, Lawsonia intracellularis
aatcaatatttcaattgatgttacttattgttgaaatgcataaggttcttttttggtatattcaatctttttgtttttaagtataatatgttgatctaccttttcattcttaataagattatgggaaatccaaactataccagcacctgcagtctttgcattaataatttcattataacatattgaaagagattggttgt

SEQ ID NO: 7396 - DNA, 200 bp, Lawsonia intracellularis
caagcccagattcaggttcatctaataatagaagcttaggttttaacatcagcactcgtgcaaagttaagccgttgtaacatgccacgtgaaaatgttcttgtacgttcatagatgaaacgagtaagtttcatttgttcaatagcagttgctatttgttttttatcaagacgttttttataaagccgcccccaaaagaga

SEQ ID NO: 7397 - DNA, 200 bp, Lawsonia intracellularis
agattttcataggctgaaagatcttgataaataaatggagtatgcccaagataaccaatttcttctaagctacagttaaatataatttctcctgacgttggttttagaagccctgccatgatcttgagtaatgtacttttaccagctccattttctcctgttaaatatgttatagtattagaagtaatattaagtgatat

SEQ ID NO: 7398 - DNA, 200 bp, Lawsonia intracellularis
gtttttgaggataggccgattactatatactttgctgatagctattagctgaagaagcataattttttcccctataactggatataatagagaagaatggtagcaaacttataatggcaccaccaatccaaatccaattgactaaaggcatagagcttaatctgaatagagcacgattttgatgatctacagctaagaga

SEQ ID NO: 7399 - DNA, 200 bp, Lawsonia intracellularis
gaagcataaagttcatttccaagagaaggaatagtatcggcttcagcaaattgcattttcccccattttttataaatacgacgttggggggcaataaaatcaataaacttcccatccttacgtacttcaagtaagccttctatataagcatagtcaactagttctccttcttggattttgataagttttatatcaaaatt

SEQ ID NO: 7400 - DNA, 200 bp, Lawsonia intracellularis
tcctacttttattgtttctccttcatgtagtatttgttcaatttctatcttatagggaccagagaaagcaattcccatagcaataagcgcaactccaaagtgaatgccatacgctagtaacataggtttatttgaacgtgtttgtttgtctaatacaagtaatactgtacttgtcatgatagcaaaggcagacgaagctc

SEQ ID NO: 7401 - DNA, 200 bp, Lawsonia intracellularis
ctagaatggcgataggtaactgatatcctgatagatacattatgcatgaagatgtaaaaaaagtaataagaacaagagtaatattttttagattatggatacctcttgtccatcctaaccaaggacataaagagagaagagccataagtattgcaaaaagaggaagacatgttttattataaaagtctgacgtaagtcct

SEQ ID NO: 7402 - DNA, 200 bp, Lawsonia intracellularis
atacttcctgcagattcttgattgatggaagtagaagactggagaattgattgtcctaatattatttgattccaaaaggaagtaaagactggccacatagttgcaagaagaattaatattgcaagagcaagtaatagccaagaagtaaagataagaaatcctatacgactattaatagtagaaagttcactgttatcttt

SEQ ID NO: 7403 - DNA, 200 bp, Lawsonia intracellularis
tgttgagtatgcagtatagaaaatagagataatagttattgttgcaaatgttataaaaataaggagaggtttcccaacattgcttgttccaaatgcatgtacagattgaacaatgccgctacgtacaaggtaagtggcaaaaaaagtggaaagagttgttagtgccataagaaaaacgtttatgtgagttagtacatttt

SEQ ID NO: 7404 - DNA, 200 bp, Lawsonia intracellularis
tatgtgtttgaataataatagtatgtaatgcagctgttgatataagccatggaatgagggatgcattttcaactggatcccatgcccagtaaccaccccacccaagttccatataagcccaccatcctccaagaacaattccagcagtaagaaatgcccatgccgagagtataaatggcttagaaataactatccagcta

SEQ ID NO: 7405 - DNA, 200 bp, Lawsonia intracellularis
ggttcctctttttgattacttattgtttgtgcaagagcaaggcagccagggatagtaaaccaaccatatcctaaaaataataaaggtggatgaaaaatcatgcctggattttggagtaagggattaaggccatttccatctataggttttatatcaagtaaaataaatgggttattccatgtaatgagaagaagcccaaa

SEQ ID NO: 7406 - DNA, 200 bp, Lawsonia intracellularis
gaatgccataatacttaaataaagtatccaaaaccaaagttttgtgtctatagaaagttttttatagagataagtatgttgaaatatacagctagcaatggaagtagatagtgcccagaataacattgaacctgcttggccagcccaaaaggctgtaatacgataaaaaagaggtagaaattgatcagtataactggcta

SEQ ID NO: 7407 - DNA, 200 bp, Lawsonia intracellularis
catattgtaatgaaaagttataactagctaacgcatacgttaaaatacctgaagcaatggaaagcaatattgtaatacttatagaagtaatttctgcaagtgtaaggcttactttttttgatgattgattaggatatttattttttattattaatatgaatttatttaatttatgccatggccaaagtgtattagctatc

SEQ ID NO: 7408 - DNA, 200 bp, Lawsonia intracellularis
cagaagatatcaattaaagctatagtcataatagccgctaagacactaaaggcaaaatagtacatcttaactccaacaactatttttattatatcttatcttggttactactaattgtttcattcagagaagaaattaggttattattttttgtatctatattataattaactttttttctcttctttttcgtatttaga

SEQ ID NO: 7409 - DNA, 200 bp, Lawsonia intracellularis
tggacattttgtcataagtgtttttgcttgaaagattccttcaggggtaagtgaaccttctacaatggcttctgcacctgttctgaaggtgtctggaataactcctgtatattcaacagatattacgtttgaaggatattctttatctcttaattggaaagaaatagtttttccatgttgctgtgtataatgttctgcta

SEQ ID NO: 7410 - DNA, 200 bp, Lawsonia intracellularis
taacaataccaaaaagtcttgcagacttaagtttttcactaggcattgctatggcttcttttacattaagaaaatatacactattttcatagaatcctataaatgcaagatagccaatacctactatgaataataagagagctattatatatacataagtagtattagaagtttttttatccatactcactctcctactt

SEQ ID NO: 7411 - DNA, 200 bp, Lawsonia intracellularis
tattttgaaaggtgtttcagcttacactttaagttatattaatacttattagagagtaaaggtatatttctgttattttaaaagagtatttttattattttggattaatgcactatgtcttttttttgcaagtgctctaagatcaggtgttgtatcactttcatcaacaatttctcttccaagcatagtttctaatacat

SEQ ID NO: 7412 - DNA, 200 bp, Lawsonia intracellularis
cttctaaggaaacaacaccagataatcccccatactcatcaagtacaataaaaagatgttgtctttcttctaaaaatgcaagaagtaaatgatctacagtttgactttcaaggacaaattttgctggttgcataatttctaaaagttttttttctgtttctccattggtcatatatcgtccaatttcatatcgttggata

SEQ ID NO: 7413 - DNA, 200 bp, Lawsonia intracellularis
atgccagtaatgtcttcgttattttctccataagtagggatgcgactatagttccatattttggggttgctataagcttcagagacagtaaggttttcatgaagtgaaaagaccatagttctgggagtcataatttcatgagcatattttaaatcaagactaaggatattttttatgacatgttcttcatatggcttaat

SEQ ID NO: 7414 - DNA, 200 bp, Lawsonia intracellularis
acgaccagactctctggaaagacttgtaagtgcacggatgtcatcttctgtaactgtaggacgttttcgaggtgaaacaagtcgtgttaagtagcttgaaagcataataaggggttttaaagtaactataagaatacagagaggattaaggagaattatagcaatacgtttagagtaagcaacacctagtgttttaggta

SEQ ID NO: 7415 - DNA, 200 bp, Lawsonia intracellularis
taatttccccaaaagctaaaataagcaaggtgaggattgctgcaaagaaaggcatagtagattcatgaagtgttgttgtagcaattgctccagcaagggcagctccagcagtatttgctatagtattcaatattaatacggctgtaataggctgatcaatattactatgtaaataataaagtttttctccttttttgctt

SEQ ID NO: 7416 - DNA, 200 bp, Lawsonia intracellularis
ccctgttcacgaaggtgttcaatataagtaatagggatagagtatatagcagcttccatcattgagcataatgcagagataagaacaataagaaaaacagttcctaaaaggattatcatgattattgtcctaataaattgctctaattagaagtgctgctaacatagcgtaagttattatagcttgtgctaattaaaagt

SEQ ID NO: 7417 - DNA, 200 bp, Lawsonia intracellularis
tgatatgtacacctatagttaatttttttctaacaagtagataattgaagatcaatatgttgaggaaagtaatagtaattagcaattatattgataagtctacacatcttacttaatttactatacaatttttttttaagttaaaaaatttttaataaaaaaatataacattgagtcatcagtacttgacgaatatgttt

SEQ ID NO: 7418 - DNA, 200 bp, Lawsonia intracellularis
cacttaggtattaatgcctttcctatgtgttatgggattccctgtgcggcagggaagaataattttaaaagattattctattgttggattgccagcaataaattacaaggtatagacttttaagggtagattcactttagatgcaatataaatttgctaataattaaagtgtattttagagtaagaatataattaattaa

SEQ ID NO: 7419 - DNA, 200 bp, Lawsonia intracellularis
atagtctaagtaccttgtgggaccacctgtcttttcctggactgttccagtttaggccaggcttagcagtaattatttttattaattttttaggatgctgctaggttggctcttgtcccgatattccgcatagtgctagctgtctagccaacagaaagtagtacttataaaggttagctttaaccatggttgggctattg

SEQ ID NO: 7420 - DNA, 200 bp, Lawsonia intracellularis
tttgattttagttatcttaggtgggcgctgataggtttttgttgatatttagtatggagtaagacaatgacgacagtaagcagtgatcgtatacgtataaagttaaaggcatacgattatcgcattcttgataaggcagtagcagaaattgtagatacagcaagaaatacaggtgcaagtattgctgggcctatccctct

SEQ ID NO: 7421 - DNA, 200 bp, Lawsonia intracellularis
tcctaccaatatccataaatttacagtaaatcgttctgttcatgtagataaaaagtcccgtgagcaatttgagatgagaatccataagcgtcttatggatattttagaacctacacagcaaacagtagatgctcttggtaaacttagtttgcctgctggtgtagatgtagaaattaagctttaatggaagagtttgaggg

SEQ ID NO: 7422 - DNA, 200 bp, Lawsonia intracellularis
gcgtcatgtctgaaaaaataggaattttgggtcaaaagttaggaatgactcaggtttttggtggaaatggatttgctgttcctgtaactgttgttcaagctgggccatgtcctatagtgcaaattaagacagtagaaaaagaggggtataacgctcttcagattgcctttggtgaagggaaaaagaaacatgtttcaaag

SEQ ID NO: 7423 - DNA, 200 bp, Lawsonia intracellularis
tctatgcaggggcatttttctaaagcaggtttaagtctttatcgaaaaatacaagaggtacgtcttaagggtagcttaacaagttatgaggtaggacaagtccttacagtaggattattttctgtaggagataaagtaaaaattaccgggaaaagtattggtaaaggctttcaaggggctatgcgtcgttggaactttgc

SEQ ID NO: 7424 - DNA, 200 bp, Lawsonia intracellularis
tggctctaaagatagtcatggttgtgaaaaagtccatcgtgcagctggctctataggtaataatacattccctggacatgtctttaaagggaaaaagatggctggccattggggtacagagaaggtgacagttcaaaatcttgttgtagtagatattcggccagaggataatattattctgatacatggttctgttccag

SEQ ID NO: 7425 - DNA, 200 bp, Lawsonia intracellularis
ggccaaaaaatagttttttatttatatctatgcaataggtttggagaaaatatatggcgattgttacagtttataatcagcaaaaagaagaaactggtaaaattaatttatcttctaaaatatttgaagttcaagtgcagccagaaattctccatcttgtagtaagagcacagttggcagctaagcgtgcaggaactcat

SEQ ID NO: 7426 - DNA, 200 bp, Lawsonia intracellularis
tctgtcaagacaagaggacatgtctcaggtggtggtgcaaagccttggcgtcaaaaaggaactggacgtgcacgtgctggctcaaatcgttctccattatggagagggggaggaatagtttttggccctcagcctcgtgattatagttttaaagtcaataaaaagattcgtagcttagcgctatgtatggcattatcttc

SEQ ID NO: 7427 - DNA, 200 bp, Lawsonia intracellularis
acgttttgcagaagaaaatcttatagtaattgataatattgtccttcctgagataaaaacaaagcattttgttggagttgcaaatatacttggacttcataaggctcttattgttgctccagtggagtcaacacaacttttgctttctatgcgtaatgtccctaatgttaaattgcttacttatgatcgcttaaatgtat

SEQ ID NO: 7428 - DNA, 200 bp, Lawsonia intracellularis
atgatattcttaagtataaacagcttgtattattagagggtgctgttcaacatattgaggctcgtttaaaataggtggttatttatatatgcatcctacacaaattatattacgtcctgttataactgaaaaagtaactatactaagagacagtgtaaaaaaagttgcattttttgtacatcctcaatcaaataaaattg

SEQ ID NO: 7429 - DNA, 200 bp, Lawsonia intracellularis
aggttaaaaaagctatagagttactttttaatgttaaagttatggctataaatgtagttaattatactcctcgggtacgcacacgtaatcgtcgtaaggtacatgtttctgggtgtcgaaaggcatatgtgactcttgccccaggagagaagatttcattttttgaaggattataataatggctatacgtaatttaaagc

SEQ ID NO: 7430 - DNA, 200 bp, Lawsonia intracellularis
caacttcaccaggttgtcgcttccagactatttcagattttaaagaaattacttgttcaagccctgaaaaaagtctaacatatgggctttgtaaaaaagctggtcgtaataatcatggtcatataactagtcggcgtcgaggtggtggtgctaaaaggttatatcgtcttattgattttaaaagagataaggtaggagtt

SEQ ID NO: 7431 - DNA, 200 bp, Lawsonia intracellularis
ccagcaaaagtagcacaaatagaatatgatccaaaccgtacagcacgtatagcattattgcattatgtagatggagaaaagcgttacatattggctccagtaggtattaagcagggtgatattatagaaacaggcgtagatgctgatataaagcctgggaattcacttccaatgcttcatattcctattggaacactaat

SEQ ID NO: 7432 - DNA, 200 bp, Lawsonia intracellularis
tcataatattgaattaaatcctggtcgtggaggacaactttgtcgttctgctggagcttatgctcagctggtggctagagagggtaagtatgctttgttaagaatgccatcaggtgaggtccgtaaggttttagccagtggggcagcaacagtagggcaggtaggtaatattcaccatgaaaatatttcgttaggtaaag

SEQ ID NO: 7433 - DNA, 200 bp, Lawsonia intracellularis
ctgggcgtaatcgttggctaggacgtcgtcctaaagttcgtggagttgcaatgaaccctgttgatcaccctctaggtggtggtgaaggaagaagctcaggtggtcggcatccagtttctccatgggggatgccaactaaaggttacaaaactcgagataaaaagaaaccttcttcacgcttaatagttaagcgtcgtggg

SEQ ID NO: 7434 - DNA, 200 bp, Lawsonia intracellularis
caaaaataggagtagttatgcctagatctttgaaaaaaggcccttttgtggataaagatcttatgaagaaagttgatgccgcaatagctaataatgacagacgagttttgaagacttggtctcgtagatcaacaattttacctgagatggtaggattaacgtttgctgttcataacggtaaaaaatttcttcctgttttt

SEQ ID NO: 7435 - DNA, 200 bp, Lawsonia intracellularis
ataactgagaatatggttggccataagcttggagaattttctcctacacgtactttttatggtcatgctggtgataaaaagacaaaggcaaaaaagtagtggtgaagtaatatggagtcaaaagcatgtgctaaatttatacgtgtttcacctaggaaggcaaggcttattgcttctaatgttaaaggaaaaactgttga

SEQ ID NO: 7436 - DNA, 200 bp, Lawsonia intracellularis
gttagcaatgaatatattgaaatttactcctaacaagtcagcaggtattattttaggtgtaatgcgttctgcgcttgcaaatgcagagcataatgcaaagctagatgtagatactttgattgttaaagaagtaatagtgaatgaaggacctacatggaagcgttttatgccacgtgcacaaggtcgtgctactcatattc

SEQ ID NO: 7437 - DNA, 200 bp, Lawsonia intracellularis
gtaaaagaagtagccatatttcagtggtattatcagaggggcaggaataaatcatgggacaaaaagtacatccatatggatttaggcttgggtataataaaaattggcagtctcgttggtttagcaaaaaagattatgcaaattttatatatgaagattacaaaattcgtagttatataaaaaaattattatatagtgct

SEQ ID NO: 7438 - DNA, 200 bp, Lawsonia intracellularis
ggtatctctaaaatggagattgagcgtgcaggtggaaagatatgtttaatgttatctactgcacgtccaggtatagttattggtcgtaagggagttgaaattgaaaagcttcgtctagaattacgcaaaaattttggacaagaattttctcttgaggttactgaagtccgtcgtccagaagtagatgcacaacttgtagc

SEQ ID NO: 7439 - DNA, 200 bp, Lawsonia intracellularis
tgagaatattgctatgcaacttgagcgtcgtgtagcttttcgtcgagcaatgaaaagaactgttagtatggctcgtaagtttggtgcagagggaataaaaataacttgttctggccgactggctggtgctgaaattgctcgtacagaatggtatcgtgatggacgtgtacccttacaaacactacgtgcagatattgatt

SEQ ID NO: 7440 - DNA, 200 bp, Lawsonia intracellularis
atggttttgctgaggcacatacaacatatggtattattggagtcaaggtatggatttataagggtgaagtccttgataaagaggttgaaaaataatgcttgcacctaaaaaagtaaaatttcgaaaatggcagaaaggacgtttgcgtggtccagcattacgtggaatttctattgcatatggcgatattgccttgaagt

SEQ ID NO: 7441 - DNA, 200 bp, Lawsonia intracellularis
caactgagcatggaaagttaacaagtcaacaaattgaggcagctcgtattgcaatgatgcgtcatataaagcgtggaggaaaagtttggattagagtatttcctgatcatcctattacagcaaagccactagaaacacgtcaaggtagtggtaagggttctccagtaggttggtgtgcaccagtaaagccaggccgtatt

SEQ ID NO: 7442 - DNA, 200 bp, Lawsonia intracellularis
ttgtatgaaataaaaggtgtaaatattgatcttgctagagaagcattaattcgtgcagcacacaaattaccagtaaaaacagttattgttttaaaagagaggctgtagtgaaagataataaatatcagctaatggatgaagcaagtttaaaattaaagttagctgaaaaacgtgaagagctttttaaattacgctttcag

SEQ ID NO: 7443 - DNA, 200 bp, Lawsonia intracellularis
catgctgcaggtcaactggaaaagacatcatctcttttagtattaagaagagatattgcacggattttgacaatattgaaggaaaaggtatagctatgcctcagataatagcaaaatgtaatggtcgtgtgcttgttggtacggtgattagcgacaaaaatgataaaactattattgtgcatgttgaaacacttgtgaag

SEQ ID NO: 7444 - DNA, 200 bp, Lawsonia intracellularis
catcctttacttaaaaaatttattcgacatagaaaaaagtttactgctcatgatccattaaatgaatgtagtattggtgatacagtaaaaataatagagtttcgtccattaagccggaataaacgttggcatcttgtggcaatacttgaaaaggctgtttaataggggagagttattatgattcaagttgagtctacact

SEQ ID NO: 7445 - DNA, 200 bp, Lawsonia intracellularis
tcaagttgctgataattcaggggctaaaaaggttgcatgtattaaagtgttaggtggttctaagagacgttatgctactgtgggagatattatagtagtttcagttaaagaagcaattccacatagtaaagttaaaaaaggtgaagtattacaagctgtaattgttagaactaaaaaggaagttcgtcggatggatggtt

SEQ ID NO: 7446 - DNA, 200 bp, Lawsonia intracellularis
catatattaagtttgattctaatgctgctgtattactttctaagcaaggagagccagtaggaactcgtatatttggtcctgtagcacgagaattgcgtgcacgaaattttatgaaaattatatctcttgcacctgaagttttataggaaatattatgcaacaaatacgcatacataaaaatgataaagtaatggttattg

SEQ ID NO: 7447 - DNA, 200 bp, Lawsonia intracellularis
ctggcaaagataaaggtaaaattggcaaggttcttaaagtttgtcataagcataatagaatactagtagaaaaagtaaacatagttaagcgtcatgtaaaaccaaatccatatcgtcgtgaacatggtggcataatagaaaaagaattgcctatagttacttctaatctaatgattatttgctcttcgtgtacatctcca

SEQ ID NO: 7448 - DNA, 200 bp, Lawsonia intracellularis
acacgcgtacactatcgttattctgaaagtggtaaaaaattacgtatttgtaaaaaatgtaatgagtcactataaggtgatattatgacacgacttgaaaaattttatcaagaaaaagtagttccagctttacaaaaagaatttctttataagtctattatgcaagttcctacaattgaaaaaatttcactcaatattgg

SEQ ID NO: 7449 - DNA, 200 bp, Lawsonia intracellularis
acttggtgttgctagtcaaagcaataaaattatggaagaggcaatatcagagctttctttaattgctggtcaaaaagctgttataactcgcgctaagaagtcaattgcatcatttaagttgcgtgaagggatgccgataggctgtagggtaactttaagaaaagagcgtatgtgggattttcttgataagttaatgaatt

SEQ ID NO: 7450 - DNA, 200 bp, Lawsonia intracellularis
ttgcattacctcgagtccgagattttcgtggtgtttcagaaaatggttttgatggtcatgggaactttacacttggtattaaggaacattctatttttcctgaactggagatagatcgtattgaaaacactaaaggtatgaatattactatagttactagtgctgtattagacagtgaaggtaaagttctattagattta

SEQ ID NO: 7451 - DNA, 200 bp, Lawsonia intracellularis
ttaggaatgccttttaaaaaataaaataaggggtcaaaattgtgtcacgtacttctcttgaagtaaaggcaagacgtaaacctaaattttttgttcgtgcatataatcgttgtcctatatgtggtagagggcgtgcttttatgcgtaagtttggtttatgtcgtatatgtgttcgtaatatggctcatcgtggtgagctg

SEQ ID NO: 7452 - DNA, 200 bp, Lawsonia intracellularis
cctggtgttcgtaaatcaagctggtaataatgcaatgtgttaggagaatatattaatgatgactgatcctatttcggatatgttaacacgtattcgtaatgcacagttggctctacataaagatgtagcaatcccatattcaaagataaaatattctattgcaaatattcttaaagaagagggttatattaatgaattaa

SEQ ID NO: 7453 - DNA, 200 bp, Lawsonia intracellularis
ctttgaataatggtactattactctttacttcaaatattataaaggcaaagctgctattgaaggcttgaggcgtataagtaaatctggaagaagagtttatgtaagtacacatgatattccttctgtacaaaatggattaggtatttgtattctttctacatcgattggtgtgattggctgtaataaagctcgttgctca

SEQ ID NO: 7454 - DNA, 200 bp, Lawsonia intracellularis
aaagtgggtggagagcttttatgtgaagtatggtagggatattatgtcaagaattggaaagttacctattatgattccagctggtgtggaaattacatttggtgaaaaaaatattagtataaaaggaccaaaggcaactcttgttacaccaaagtgtgaactcctttcttatgagcataaagaagataaaataattttaa

SEQ ID NO: 7455 - DNA, 200 bp, Lawsonia intracellularis
cttgtaattttgatacacgtgaatcattagcacagtatggattacgtcgaactcttttagctaattgtatagaaggggtaactaaaggtttttcaaaaacacttgaagtaattggtgtgggatatcgtgtttcagtaaaaggtaacatagttgaattgtctgtaggttattctcatcctgtacatattgaactacctgat

SEQ ID NO: 7456 - DNA, 200 bp, Lawsonia intracellularis
ggtattactgcaaaagcagaaggtcaaaagcttacaattatgggatctgataaagtcctagtaggtgagatggcagcacggattcgtcgtatacgtaaacctgaaccatataaaggtaaaggtattaagtatgaaagtgaaattatacgtcgaaaagctggtaagtcaggtggcaaggggaaaaagtagttaggagtagt

SEQ ID NO: 7457 - DNA, 200 bp, Lawsonia intracellularis
tatgagtattaaaagtaagaataaacttagacaacatcgtaaaattcgaattagaaaaaaaatttttggtactgctgaccaaccaagactagtaatttttagatctaacttacacatttatgcacaacttgttgatgatattacaggatctactcttttaacaacttcaactctttctttaaaagataatggaataaata

SEQ ID NO: 7458 - DNA, 200 bp, Lawsonia intracellularis
ttcgtgctaataaatctggttcaacattagttgggaaagagattgcacgtttagcaatagaaaaacagattataaaaattgtatttgatcgtaatggatatttgtaccatggtagggtaaaggcagtagcagatggtgctcgtgaaggcggattaaagttttaggttagttaggaagaggcttttattatggaacaaagt

SEQ ID NO: 7459 - DNA, 200 bp, Lawsonia intracellularis
gaattaggcttcattgaaaaagttgtttctttaaaccgtgtagctaaagtggtaaagggtggtcgtcgttttagctttagtgcgcttgtggttgttggtgatggtaaggggagtgttggttttggtcttgggaaagcacaagaagttcctgaagcattaagaaaagcaacagaacaagcacgaaaagcaatgatgaaaat

SEQ ID NO: 7460 - DNA, 200 bp, Lawsonia intracellularis
tcctcttattgaaggtactcttccatatgaaatacttggagagtttggtgcaggtagtgtaatgcttaagccagcatctcgtggtacaggtataattgctgggggtgcagttcgagctataatggaagcagcaggagttacagatgtacttgcaaaagctattggtacaaataaccctcataatgttcttcgagctacaa

SEQ ID NO: 7461 - DNA, 200 bp, Lawsonia intracellularis
tggcaggcttgtcagcattacgtagtgcacaattggtgagcaatattcgtggtaaattgttagaagcaccaaggaaataatgatatgtcttatattagaataaagttgaaaagaagtcgcatcaactgtactcctattcagcgtaaagttttggatgcacttgggcttcgtcgtcgtgaaatggtaaaaacttttacaga

SEQ ID NO: 7462 - DNA, 200 bp, Lawsonia intracellularis
tagtgcttctattcaaggtatgattattaaggtatcacatttagttgaggtaagtaatttatgaacttaaccacactttacccatttttagaagagcgtaaattgcgtaaaagagtcgggcgtggttctgcttctggtttaggttgtacttcagggaaagggaataagggacaaaatgcccgctcaggtggaggcgttcg

SEQ ID NO: 7463 - DNA, 200 bp, Lawsonia intracellularis
cccaggctttgaaggtggccaaatgccattacagcgacgtttaccaaaacatggatttaaaaatgcattttttaaagttgaatatgcaatttttaatttggattggttaacaactttttttaaagggaaaaatgaaattttacttgaagatatttatagccataaattatgctctgtgggtacccctgtaaaaattcttg

SEQ ID NO: 7464 - DNA, 200 bp, Lawsonia intracellularis
gttcaggtagcatttctaatatagtgacaattgaagcacataaatttagtcggtctgcattgaagaagcttcatgaagtaggtggtcaagcaaagattatagaaaaataggggtatattatatggccgttagtactacaactcttaatgcagcacctgaattaaagataaaattattatggacagtaggacttttgtgtg

SEQ ID NO: 7465 - DNA, 200 bp, Lawsonia intracellularis
cctatcgtattggcgtccatattcctgttccaggagttgacggaattgctcttactcatttttttgaaagtgtagcaggaaccttgtttggattatttgatatgttctcaggtggaggcttgagaaatgtatcagtgtttgcacttgggattatgccatatatttctgcttcaattattatgcagttattacaggtaatt

SEQ ID NO: 7466 - DNA, 200 bp, Lawsonia intracellularis
attcctgactttaagagaatggcaaaagaggaaggtgcagcaggacgatacaaaataacacaatatactcgttatggaacggtgattattactcttattcaaggaattggcattgctattggtcttgaaagtatgtatagtcctactaatatacctattgtattggaaccaggctgggtatttagaattgtaacagtttt

SEQ ID NO: 7467 - DNA, 200 bp, Lawsonia intracellularis
aaccttaactgcagggactgttctaattatgtggcttggtgagcaaatttcagaaaaaggtatcggtaatggaatatctttaattatattttctggaattgttgttggtattcctggtgcaatagtcaaaacatatcagttaataatacttggtgatatgaatatactaatcgcattagttttaatgttatttatgtttg

SEQ ID NO: 7468 - DNA, 200 bp, Lawsonia intracellularis
ctgtattaactggtgttgtttttatggaaagagctcaacgaagaattcctatacaatatgcaaaaagacagctaggaagaaaggtttatggtggacaatcaacacacttgcctctccgtgttaatacagcaggtgtaattccacctatttttgcttcaagtcttcttttatttcctgctacaatggctagttttgatatt

SEQ ID NO: 7469 - DNA, 200 bp, Lawsonia intracellularis
tctgattggttaaaagatattgcagtttggttttcgccatcaactatactttataattgtatttttttagtacttattttctttttttgttatttttatacagcaattatttttgattctaaagatatttcagaaaatttaaaaaaagctggtggttttattcctggtattcgtccaggagagaagacatgtgaatatct

SEQ ID NO: 7470 - DNA, 200 bp, Lawsonia intracellularis
tgatggagtcctttcaagacttactctttgggggggggtatatatttcaattatttcaattttacctatgatgcttatttctcaatttaatgtcccattttattttggggggacaagtattcttattttagttggtgttgcaatggactttatgtctcaaattgagtcacatttcatatctaaacagtatgaagggctca

SEQ ID NO: 7471 - DNA, 200 bp, Lawsonia intracellularis
tgaataaaaagactaaaggacgaggctaacttgtgaaaaaatatagaggtacattccttaaaaatgaaagagaaataggaattcttaaagaagcaaatcgtatggtagctaccatacttgaagaattagaaaaacaagttagacctggattatctactctttattttgaagacattgtgcaacaaatgtgtcgtgaattc

SEQ ID NO: 7472 - DNA, 200 bp, Lawsonia intracellularis
aaagttaaaccagcattccagggttattatggatatccgtatgcactatgttgttctgtaaatgaagctgttgttcatggtgtcccatcagaaaaaaaaattcttcaagaaggagatatagttagctttgatgttggggttttataccaaggattttatggtgatgctgctaggacagttcctgtaggtactatttcatc

SEQ ID NO: 7473 - DNA, 200 bp, Lawsonia intracellularis
ggaagcatctcaacttatacagataacaagagaaagcttagaacttggtgtgttagagacaagagcaggaaatcatttatatgacatttcttctgcaattcagcatcatgtggaaagtgcaggctttcatatagttaaacgttttgtaggacatggaattggcatagggttgcatgaaaagcctgaagttcctaattttg

SEQ ID NO: 7474 - DNA, 200 bp, Lawsonia intracellularis
ttcctactgtaggtttaggaatacctttaaaggtaggaatggtattagcaattgagcctatggtaacaataggttctccagaggtagaaatattagaagataaatggacagctataacttgtgatagaagtttagctgctcatttcgagcacagcgttgctatacttccatctggaccttgtgtgttagatagtctagta

SEQ ID NO: 7475 - DNA, 200 bp, Lawsonia intracellularis
taatttagtatttgacaaaatattttaaaaaagttaaggcttcctgttttatataaataagtaagaattaactggtaaggtgtggaagtagccatgaaagttagaccatctgtaaaaagaatttgtcccaaatgcaaagttattaggcgtagggggatacttagagttatctgtgaaaatcctaggcataaacaacgcca

SEQ ID NO: 7476 - DNA, 200 bp, Lawsonia intracellularis
aggttaatagttaggagaaaaactgtggctagaatagctggtattgatttgccaagaggtaaacgttcagatatagcattaagttatatttatggtgttggtagagtaacagctctaaaagttcttgatgctgtaggtattaactggagtcgtagtattgatgatctttctgctgaagagttgaatgaagttcgtaaaga

SEQ ID NO: 7477 - DNA, 200 bp, Lawsonia intracellularis
gcttgagaaaaattataaggtagaaggagagttacgtagagaagtgtcagctaatattaaacgtttaatggatattggctgctacagaggtcttaggcatcgaaagggtcttcctgttcatggtcagcgtactcatacaaatgcacgtacaagaaaaggaccaagaaaaggtgctgtaggaaagaaaaagtaaaatttat

SEQ ID NO: 7478 - DNA, 200 bp, Lawsonia intracellularis
acttttttaatcattagttaattcaagtctattatataaaagagaagttatggctaaaccaaaacgtattgggaaaaaacgtgaaaagaaaaatattcctgttggagtagttcatattcaagcatcttttaacaatacaataattacatttacagacccacgtggaaatactattagttgggcaagttctggtcaaagtg

SEQ ID NO: 7479 - DNA, 200 bp, Lawsonia intracellularis
gttttaaaggttcacgtaaatcaactccttttgcagcacaagttgcagcagaacaggctgcacgtcgtgctcaagataatggtatgcgtactgtggggatatatgtaaaagggccaggttctggacgtgaatctgctatgcgtgctattaatgctgtaggatttaaagttgcttttattcgtgatattacccccattcca

SEQ ID NO: 7480 - DNA, 200 bp, Lawsonia intracellularis
cataatggttgtcgcccacctaagaggcgtcgtgtctagtttttactagaggaggattgtcttggctaaatataatgatgccaaatgtcgtttatgtcgtcgtgaaggaactaagctttttttaaaaggtgatcgttgttttactgataagtgtgcatatgatcgtcgaccatatgctcctggacaacatggtcgtgtac

SEQ ID NO: 7481 - DNA, 200 bp, Lawsonia intracellularis
ggaaaaaaatgagtgattatgccatacaactacgtgagaaacaaaaagttcgtcgagtatatggtgtattagaaaagcagtttcgagaatattttgtccatgctgatatggcaaaaggtattacaggagtaaatttgctttcttatttagaacgtcgtcttgataatgttgtgtatcgtcttggacttgcaaattcacgc

SEQ ID NO: 7482 - DNA, 200 bp, Lawsonia intracellularis
gttcaagcacgtcaacttattagacatggaatttttacattaaacggacataaggtcactatcccttcattgcaagttaatgttggagatagtattgaggtacctgaaaaaaatcgtaaaatatctgttgttgctgacgcacaatcgatagttggtcgtcgtgggtgcccatcttggcttgaattagatgcttccacttt

SEQ ID NO: 7483 - DNA, 200 bp, Lawsonia intracellularis
taagggtgttgtaaaggcgctacctcagcgtgaagatattcaattccccattaatgagcatcttattgttgagctttactccaaataggtggaggattatatgctctttagagaaggaactaggcttattaattcacgtaactgggcaaaacttgtacgtccagaagcagtgataaataatatggaatccaatactacga

SEQ ID NO: 7484 - DNA, 200 bp, Lawsonia intracellularis
catacggacgttttgagtatgaaccacttgaacgtgggtatggtattactattggtaatgcattacgaagggtgttactttcatctcttcagggtgctgcatttgtatctgtaaaaattcttggtgttcaacatgagtttacaactattcctggaatacttgaagatgtaacagatattattcttaacctgaaacaggtt

SEQ ID NO: 7485 - DNA, 200 bp, Lawsonia intracellularis
cgtttagctatggatacagatgaaccacagcacctttctctttttgtatctaaaaaagggattgttactgccgctgatatccaaacgaatcaacatgttgaagttttaaatccagaacaacatattgcaacattaacagaagatattgagcttcgaatggagtttgaagttcgtatgggtaagggctatgttcctgcaga

SEQ ID NO: 7486 - DNA, 200 bp, Lawsonia intracellularis
aatgcatgaagatcttcatgaggaaattggtcttattaagttagattcaagtttttcaccaattcgtaatgtaacttatgtagtagaacaagcacgtgttggtcagatgacaaactatgataagttagtgctggaagtatggacagatggttcagtttctcctgaagatgctattgcatacagtgctaaaattatcaaag

SEQ ID NO: 7487 - DNA, 200 bp, Lawsonia intracellularis
atcaaatttctgtttttattaattttgatgagcgtatctcagggagtggtggaaatgaaggtagcggtagttcagatctgaatgataatctgtttaaaggtattgatgaacttgaactttctgtacgtgctacaaattgtttacgtagtgctaatatttcgactgttggagagcttgtccaaaaggcagaagctgatatg

SEQ ID NO: 7488 - DNA, 200 bp, Lawsonia intracellularis
ttaaagacaaagaattttgggaaaaaatctcttgatgaaattaaggcacttcttactagtatggggcttgattttggtatgaagattgacggatttgagaaaaaataccaagaatggaaaaggaagcaacatcatgaggcataaaaattctggtaaaaaattaaatagaaccccatctcatcgaaaagcattatttcgga

SEQ ID NO: 7489 - DNA, 200 bp, Lawsonia intracellularis
atatggcaaatgaacttattaagcatggaaaaatttgtacaactgagacaaaagccaaagaattacggaggattgtagaacctcttatcacactggctttaagaaatgacttacattcacgtagattagcttttcaatcaatgggtgatcatcagttggtaaagcatctatttaataatgtagctccagcgtttgttaat

SEQ ID NO: 7490 - DNA, 200 bp, Lawsonia intracellularis
gttcctggtggttatactagaattacgcgccttgcattaagaagaaaaggtgattgtgctcctatggcaatgattgagtttacttgtcaaaaaattgatgaaaagagtatttagtaattttcattgaataatacataataataaaaggtcaccttttcatttataggtgaccttttattattattattattattatgtat

SEQ ID NO: 7491 - DNA, 200 bp, Lawsonia intracellularis
tattttatttgacgcagttatgactaatttttcttttctataagatttatattgaaattttacttttatcttcttatctattttcaataatgtaataataaattaaatgtagtgttattagaaataaattaacagtacatcaccttattaatttttattagttttggtaatagctcattattaataatataactcttgag

SEQ ID NO: 7492 - DNA, 200 bp, Lawsonia intracellularis
gacctatgatgaataacatttatcctatcattttgtgtggaggaagtggtactcgcttatggccgttatcaagagaatattatccaaaacaattcattaattttggttctggcactctatttgagaatacattgtcgtgtatagcttcgttaagaaatgtccaaaatcctatagtagtctgtaatgaggaacaccgtttt

SEQ ID NO: 7493 - DNA, 200 bp, Lawsonia intracellularis
tttgtttcgaaattgttacaacaacaaaatagggttgcaacaattattttagagccagaagggaaaaatacagcccctgcaattgcccttggagtatctgcggttagtgagttagaaagcgatcctcttattcttgttttgccttcagatcaccttatcggttctaattctatttttcactcagcagtaatgagtggaat

SEQ ID NO: 7494 - DNA, 200 bp, Lawsonia intracellularis
ttcagttgccattgaaggacattttgtaacatttggggtgaatcctacaggtccagagtcaggttttggttatttacaatatgggcaagaagttagtgatggtatttttaaaattttaaactttactgaaaagcctagtaaagctagggcaaaagagtttcttgcattaggcaattatgcatggaatagtggaatttttc

SEQ ID NO: 7495 - DNA, 200 bp, Lawsonia intracellularis
tttttcgtgcttcaacttatctaaatgagttagaattattagcaccacaaatttttagtgcttgtaagcaagggtgggatgagcgtactcaggatcccttaggttttttccgtcctaatagtcaaaagtttttacaatcaccttcaggttctattgattatgtcataatggaaaaaacagaaaagctttatatggttaaa

SEQ ID NO: 7496 - DNA, 200 bp, Lawsonia intracellularis
cttgaaaccaattggagtgatctgggttcatgggaatcattttataatgcagaggtacatgacagtatgggaaatgttgtatctggagacgttatagctcaagatactgaaaattgttaccttaattctacacaacgtcttgtatgtgcattaggtgttaaaaatattattgttgttgaaacagcagacgctgttctagt

SEQ ID NO: 7497 - DNA, 200 bp, Lawsonia intracellularis
tgtggatagaaatcaaacacaaaatgtaaaaaatttattggaacaattacgtatttcaggtcgtacagagtctgaaactcacatgcgtgttttccgtccttggggaagttatgaaacacttttttctagtacaggttataaagtaaaaaaaattactgtttctcctggagctacattatcacttcagttacatcaatata

SEQ ID NO: 7498 - DNA, 200 bp, Lawsonia intracellularis
gagcagaacattggattgttgtatatggaatagctaatgttactataaataaagcagagcatatagtaaaagttaatcagtctatatatattcctgtaggtgtagaacaccggctagcaaactatggagaagaacctttggaagttattgaagtacagtcaggctcatatgttggagaggatgatataattcgccttgaa

SEQ ID NO: 7499 - DNA, 200 bp, Lawsonia intracellularis
gatgtttatggaagaacagagtaataattattgaatattctataaaaatatagctaaagaatagagacaagtaaaaagatattactttttatttttaagattaaataaattaaaagtaagataaataggaaggttagttgtgtgtaatctaaacaagaacataaataatgagtgatttgttgttgatttttattaaggat

SEQ ID NO: 7500 - DNA, 200 bp, Lawsonia intracellularis
agtagaataatattcttatatttatttacttaaaaataataaatagtttttagttactcttagttaatatgaattctagagtagaatctatatcccatcacttttaggttgttttgatgattgatgagactgaaaaaccaaatgttgttgcattattcccgctagttatatttcttaccctctttattgggactggtata

SEQ ID NO: 7501 - DNA, 200 bp, Lawsonia intracellularis
tttttaacttttatgggaacagagatggctttttatcagctttcagcaacagtcgctatcctcccagctatttgtataagcgtattacaggggaagtctaatttaagcaaaaatataacgatatttctctatggaatgggtgaaattaatatcgttactatgtgtttaatttatttattagcaggcgcatttgcttctgt

SEQ ID NO: 7502 - DNA, 200 bp, Lawsonia intracellularis
aactacttctattggttgtgtttcagctacagttaattttggtctttctcttctttctccttcaatgattttacctggtctttttcttactggagcttttatctctacagcaatgggtacaagtatgggaactattgctgctatagctcctattgctgttggagtagggcagcaaacagatattagcctatcacttctta

SEQ ID NO: 7503 - DNA, 200 bp, Lawsonia intracellularis
tgggagtagttataggtggagctatgtttggtgataatctttcttttatttctgatacaactattgctgcaacacgtagtcaaaattgtgagatgaaagataagtttcggatgaatttcttgatagcactaccagcagcactaattactatattcttactttgggctagtggtacatcttcctatgtggtgcataacgag

SEQ ID NO: 7504 - DNA, 200 bp, Lawsonia intracellularis
tcatatgaatttataaaagttttaccatatcttgttattattactttagctatgataggtatgaatgtctttgtagtgttagctgttgggatacttttttcaggaatattaggtttaagcactacaaattattcttttttaatttgggcccaagatatctataaaggttttttggggatgaatgaaatatttgtactatc

SEQ ID NO: 7505 - DNA, 200 bp, Lawsonia intracellularis
aatgcttatcgggggccttggagagcttataagatatcatggtggtattgcctggcttttaaaaatggtagatactttagtaactcatttatcaaaaagaaaatctccaaaggttggagaatggtgtataggtttacttgtaactttagctaacttatgtgttgctaataatacagtagcaattatcttaacagggaaga

SEQ ID NO: 7506 - DNA, 200 bp, Lawsonia intracellularis
tgagtaaagaaattgctgataaacatgggattagttgccgtaaaagcgctagtttattagatattttttcgtgtgtcatccaagggcttatcccgtatggtgcacagttattacttgcaggatccatttcacaggtttctccattttctatagcaattgaaaattggtactgtatggctttatttttagctgcttgtatc

SEQ ID NO: 7507 - DNA, 200 bp, Lawsonia intracellularis
tccatatggattgattaatagagaacgggactatatagaaatatttttatagatataggtacgttaagcaaaattataatacattagtcttatgctgacaacaaacctaacgttagttagagaggttgctgcaagaaaagtcattgtatatatgcaatagttgatacttaacttatttattattattattattttatagt

SEQ ID NO: 7508 - DNA, 200 bp, Lawsonia intracellularis
ctatttcaaaatattttgacaattatatgcagacaatttattcatatatttatatatgataaccatatgtttcccttcacttttaccacagatactgtggtgatactatgaataatataattacagctattaaaggtttttctgacttatttcagccagaaagtaatatgttttcatacatagaacatactgctagagct

SEQ ID NO: 7509 - DNA, 200 bp, Lawsonia intracellularis
attttttctctttataattatgaagagttaagaatacctcttcttgagcggacagaacttttttgtagaagtattggtttagaaacagatattgtacaaaaagaaatgtacacatttttagatcgtaaaaatcgatcacttacattacgaccagaagcaacagctagcattattagagcatatattgaaaataaaaaata

SEQ ID NO: 7510 - DNA, 200 bp, Lawsonia intracellularis
tacacaagaagctgtgtctaaatttttaagtataggacccatgtttcgctatgaacgtcctcaaaaggggcgaatgcgacaatttcatcaagttaattgtgaatgtttaggagttacagatagttatatagatgctgaaataattattatgttaatgcaatttttaacagcattagagattaaggatattagattagaaa

SEQ ID NO: 7511 - DNA, 200 bp, Lawsonia intracellularis
ttaactcattaggatgcgctgattgtcggccattatataaagatatattacagaagtggcttgatcagcttgacacacagactttatgtgatgattgtcagcgtagaaaagaaacaaatccattgagagtactagattgtaaagtttctttttgtaaagaaaagacaagtcaagctcctcactttttagactatcaatgt

SEQ ID NO: 7512 - DNA, 200 bp, Lawsonia intracellularis
aaaacctgtcttgatcagttttcaacagtgacaactcttttaagcttagagaatattccatatattattaaccatcgtcttgtacgtggccttgattattatatgcgtacaacatttgaagtaatttcttctaatataggttctcaaggagccattgctgggggaggacgttacaatgggttggttgcacagcttggtgg

SEQ ID NO: 7513 - DNA, 200 bp, Lawsonia intracellularis
tcctgatatccctggtattggttttgcttgtggtatggagaggctagcattgcttctcccacgaaaagacttgccaaggcctgattttatgattggtgtttttatcgctgaaggaaaagataaagcattttctattagttcacaattacataaagcaggttttagtggcgaaatgttattcaacttaggtagcatgaaaa

SEQ ID NO: 7514 - DNA, 200 bp, Lawsonia intracellularis
gtttaatgagacatgctaataaggcaagagtacgttattgtttgttattaggaactgaagagttagcattgaattctatttctattaaaaatatggatacaggagtccaggaaaaaatttctttagataaggtcagttcttatttcataacaaagctaagtaaataatattgggaggaaaaaagaggatgtgtaatgtct

SEQ ID NO: 7515 - DNA, 200 bp, Lawsonia intracellularis
gaaagcaaaaaagaggttataatatgccagtcttgtgatggatggaagcgtagtcatacctgtggtgagttatcaataaaagatattggaaagcatgtaatactaatgggttgggtacaatcacgtcgggatcatggtggattaatttttgtagatttacgtgatcgctttggtataacccaagttgtttttagtccaga

SEQ ID NO: 7516 - DNA, 200 bp, Lawsonia intracellularis
tagctctttagaagcacattcaacagcacatattattcgtcctgaatacgttattgctgttgatggaattgttcgtatgcgtccagaagggatgattaacccaaatttggaaacaggacaaatagaaattttagtttcttcttggaagcttttaaatatttcgaaaacacctccttttcaaatagaagataatattgaaa

SEQ ID NO: 7517 - DNA, 200 bp, Lawsonia intracellularis
caggagaaacactccgtttgcagtggcgatatttagatttacgtcgtccagtcatgaagaaaaatattatattgcgtagtaatgctatgcaaattatacgaaactatttatcttctcacggttttttagaaatagaaacaccatttcttacaaagtctacacctgaaggggctagagattttttagtaccaagtcgctta

SEQ ID NO: 7518 - DNA, 200 bp, Lawsonia intracellularis
tatcatgggaagttatttgctcttcctcaatctccacagatttttaaacagttatgtatggttgctggtttagatcgatattttcagataactcgatgttttcgtgatgaagacttacgtgctgatagacagccagagtttactcagattgatattgaaatgagctttgttaacgaagaacaggtaatggaatgtgccga

SEQ ID NO: 7519 - DNA, 200 bp, Lawsonia intracellularis
acatttaatgcaaactctttttcaagaagcattatctacagagatttcacttcctttcccaagaataacatggtttgaagcaatgaagcaatatggagtggataagccggatatacgatttgggttagagcttcatgatgtgacatctatagtacatatgtcagagtttaaattgttttcacatgcaaagcttgtaaagg

SEQ ID NO: 7520 - DNA, 200 bp, Lawsonia intracellularis
caataagggtcccaggaggagcttcattaagtcggaaagaaattgatgactttacagagtttgtaaaaaattatggagcacagggacttgcatggatcaaaattaatgaagaggaatggcagtcaccaattgcaaagtttttatcagagaaagaaaaagaagagctttctatagaactgaatgtatcaaaaggagatata

SEQ ID NO: 7521 - DNA, 200 bp, Lawsonia intracellularis
ttatttttccaggcaggttctcctgaagttgtaaatgctgctcttggtaatttacgtgttcaattaggtaactatttaggattaatccctcaaaatacatggtcttttgtgtgggtaacagacttccctctttatgaatacagtgaggaagaaaggcgttatgtttcttgccaccatccttttactgcacctaaagaaag

SEQ ID NO: 7522 - DNA, 200 bp, Lawsonia intracellularis
tgatattcattttatgaagactaatcctgcagaagttaaagctcgagcatatgatttggtccttaatggtaatgaagtaggtgggggctccatacgtattcatcaagctgagatacagcgtcatttgtttgaggatttaggattttctttagaagatattcaacaacaatttggtttttttatagaagctcttgagtatg

SEQ ID NO: 7523 - DNA, 200 bp, Lawsonia intracellularis
gcgcgccaccacatggtggtattgcctttggattagatagattagttatgcttatgagtaactctgagtctatcagagatgttattgcattcccaaaaactcaaaagggtgcttgtcctttaacaggagcgccagactttgtttcttcaaaacaattacgtgaacttggtttaactttacgtaataaaaattaattaacc

SEQ ID NO: 7524 - DNA, 200 bp, Lawsonia intracellularis
ttatctttttgtgggaaaaagggtatgttattcctataaaatataagaaaactataggtctgtaggttttatctggataatttaatgaatcagaatagctatactaaacctcttatagaatgtaatagtttaacaaaacattttgctataaggcatggtgtatggcaacgtatacaaggatatgtacatgctgttgaaga

SEQ ID NO: 7525 - DNA, 200 bp, Lawsonia intracellularis
ggtttcactaacagtttatcagggtgaaacttttggtcttgttggtgaatcaggttgtggaaagtctacattaagccgtatgattgttgggttattacacccatctagcggtgagttgttttttaatggtcaatccatttttgattcagtgaacaaaaaagctcttcgacataaattacagatgatttttcaagatccat

SEQ ID NO: 7526 - DNA, 200 bp, Lawsonia intracellularis
tttcttctttaaatccacgcttacctataggaatttctattgcagaacctttaacagttttaaaggtatctgcaaagaaaaagttagaaagtatattagagatattagagtttgtaggtcttcaaccagaacaaaaagatcgatatcctcatgagttctctggaggacagcgtcaacgtatagctattgctagagctctt

SEQ ID NO: 7527 - DNA, 200 bp, Lawsonia intracellularis
attgctcatcctgaattacttgtatgtgatgaggctgtatcggctttagatgcctctgttcaagcacaagtattaaacttactaaaagatcttcaagcacattttggtttgacttatatctttatctctcatgatttagctgtagtaggatatatgagtgatagggttgcagttatgtatcttggaagaatagtagagtt

SEQ ID NO: 7528 - DNA, 200 bp, Lawsonia intracellularis
agccccaacaaaatctttgtttgaaagaccagcacatccatatacgcaaattttattagactctatccctattcctgatcctttttctcgaaaaacatatagattactaaaaggggaacttccaagctctctttcccctccatctggttgtccttttcatcttcaatgtccaaaagttatgccaatttgtcgtaaagaac

SEQ ID NO: 7529 - DNA, 200 bp, Lawsonia intracellularis
ttcctcaacttacggtattaaaacagacagaactagtagaaaaaaatagatttgttcgttgttttctatatacataatactattgtattagtatgaagaaattgtataataaaggttacgttataagaaaataaagaatttttatgaaaaataggacttttataattaagatggttatataatattaacattagctagag

SEQ ID NO: 7530 - DNA, 200 bp, Lawsonia intracellularis
tggtaataataacaaatgagtcaaatatcccctttatactatggaataattcctgctagatacggttcttcacgtcttcctgggaaaccattaatagatatttggggaaaacctatgttttggtatgtatatcagaatgcagtagaatctaatatttttagatctgttgtattagcaacagatagcgaagaaattgctga

SEQ ID NO: 7531 - DNA, 200 bp, Lawsonia intracellularis
atcagcccatcagttatcaattccttatgttatgacaagtgttgaacacattagtggtacagatcgtgtgtatgaagcagctataaagatgaatatagaacctgactctgtagtagtaaatatccagggagatgaaccattagtaaagccagaagctattcaacaactagtggagccatttattgatgtttctattcagg

SEQ ID NO: 7532 - DNA, 200 bp, Lawsonia intracellularis
ttactaccctttctacaagaattacagcaaatcaagcaatgttacctcatcaagttaaagttgttgtgtcttctaatggtgatgctttgtatttttcaagggcagccattccttatttaagagataacgatactgatggatattacttaggtcatattgggttatacgcttttcgtatgcatacgttggataaattcgtt

SEQ ID NO: 7533 - DNA, 200 bp, Lawsonia intracellularis
catttgccaccgtcccaattagaacaatttgaaaagttagaacaactaaggttgctagagaataatataccaattcgtgtagtaaacactaaccatacttctcagggtgttgatacagtagaagatttagaaattgttcaaggattattagctcaaagaatggaggcagtaagtcgttaatgaaagctttgctagcacta

SEQ ID NO: 7534 - DNA, 200 bp, Lawsonia intracellularis
gaagatggatttattcttgaaggtcaatctattaatggtcactgtgaaagtagtggtgaagttatttttaatactggaatgacaggttaccaagaaatccttactgatccatcttactatggacaaatggtatgtatgacatggcctctaataggtaattatggtattaataaagaagatatggagtctgaaaaaattca

SEQ ID NO: 7535 - DNA, 200 bp, Lawsonia intracellularis
tgtatctgcattaattgttaaagagtgttgtagaaacccttcaaactggaggtctgaaacatctttacctaaatttttacaagaatataacatagctgggattgaaggtattgatactagagcactgacaagacacattcggataaacggagcaatgaggggtattatttctacctcgataacagaccctaatgatctta

SEQ ID NO: 7536 - DNA, 200 bp, Lawsonia intracellularis
tattaagagtaaagaaagttccttctatggaagggcagaattatgttacaaaggttgctcctaattccccatgggtgttgtatgggcaatgtgttgtacctgctgatattaaagaggatggaagttttctttggaaacaaaataagatacctcttattgtttatgattatggtattaagtggaatattattcggttgcta

SEQ ID NO: 7537 - DNA, 200 bp, Lawsonia intracellularis
gaaggagcaggttttgatccattaatggtaccaccattattttctttagagcaagtaaaagcatcaggggctaaagctatatttttatctaatggtcctggcgatcctggaacacttatagatgagattcaaattattcgtgaattaatggagtattatcctattgcaggaatttgtcttggtcatcaattattagggca

SEQ ID NO: 7538 - DNA, 200 bp, Lawsonia intracellularis
tgctgttggcggtactacaagaaaattgacttttggtcatcatggttctaatcatcctataaaaaatcttgctacaggtcatatagaaatttcctcacaaaatcatgggttttgtgtaaactttgaaagtaataatgatatagaagttactcatattaacttgaacgataatacgttagaaggtttcattcataaaacaa

SEQ ID NO: 7539 - DNA, 200 bp, Lawsonia intracellularis
aacctattcttgcagtccaacatcatcctgaagcaagtccaggtcctatggatagccaatatttttttactcgctttaaggaggtagtactattaaagttaggatgctaactttaatagtgaagaactttttagtaaaatttacattatttttctgtggctagttgaatattttgtgggattaatcaagatgttatctct

SEQ ID NO: 7540 - DNA, 200 bp, Lawsonia intracellularis
tgggtataattttattatgctaatatttcttaacttaagaattaacaaaaagaagcctagttaattggtgtgagggaagtgaggtagttatgtccaacgaattgacacgagtcagacagcaacttagccagattcgtacacagttacgtaaggataaaatccttcctgctattcaggcattacatcatgcaataacagtg

SEQ ID NO: 7541 - DNA, 200 bp, Lawsonia intracellularis
attataaaaacaccattattaaaagcagaaaaagaagagtttgaacatatgcttcatgatgctttaggaagtattatggagcatccaaaggtgcgtgaaatttttcctctaactattatatatacaaaaggtcaagagcgccaattattgagcgatgtttatgagttgttaacagttgtagattcaactattcaggatgc

SEQ ID NO: 7542 - DNA, 200 bp, Lawsonia intracellularis
tgcaaaagaagcattaaaagattttgaaacacgcagagagagattgtttaatgaggggcagaagcagcttgaaaaaggaaatattttagaagctagagaagcttttagtaaacttgctaaagaatttaaagatgatccagaattaatgggccagattggtaaaatgtatcttaaatatgagtattatgaagatgcaatta

SEQ ID NO: 7543 - DNA, 200 bp, Lawsonia intracellularis
tatacttagagacagcgttaactattaatcctgagctagcatacctttataattacattggaatagcactacgtaaagttggaaagtttgatatagctgaaaaatactatctcagggcatctaagtatttagggaaagatcctaatcttttttttaatcttgggagattatatattgattggggagattgggaaaaggct

SEQ ID NO: 7544 - DNA, 200 bp, Lawsonia intracellularis
attgtttcggcttcagcagcactaaaagtacgtccagattttatggaagccaaaaagttacgtaagtatgcagaaaggatgaaacataagaactcttcagtactttttgaagagtgatggttcacaatagttaatttatctaaaaaatattgaatagtaatctaccagtagaatgtttcatgtaatactttactacggta

SEQ ID NO: 7545 - DNA, 200 bp, Lawsonia intracellularis
tacatcatatttacccataattccagcaagagtgtagggtaatacagtaaagaatgaccataataatgtttgtggagataccccaaccatccaaccaataatgccgattaaaagaattaatactaattggttactttttttcctaagtagaaaaaatataaataatgaagttaatgttgaccaaaaacttatagtagcaa

SEQ ID NO: 7546 - DNA, 200 bp, Lawsonia intracellularis
tgattgaaatatgttgattagtagaaagaaaacaatagtatatgaatattggtagaagtaaaataataagccctattataacctcagtatattgaagaaatatcatcatacaaagtataaagcaccctatgactaaacatatagaagagatgatctctaaaggtgtagtaagtggttgtataataggtaatggctggaac

SEQ ID NO: 7547 - DNA, 200 bp, Lawsonia intracellularis
atagcaggaatattaagtgcaagaagtattaaagcttttctccatatgcccttataaagataataaatactaccaaagagataggctaaagggttaaataatgttgaatcaggaatgggtggattaaagaagggtaagcccagggagtatgaaggtgtaacaaccctattgttaaaaagatgaaaatagttttcttcata

SEQ ID NO: 7548 - DNA, 200 bp, Lawsonia intracellularis
caaagcatgcttttttttcattgagtaacccttattatatagctttggtagatagtcaaaagactaacagatttagaaagagatacatagtagttagagtttgttgtggagggggtataccatacaacaagctttttgcttttttattaatgaattgttagtagaaagctgcaagaattagaaagtaggttagaataaag

SEQ ID NO: 7549 - DNA, 200 bp, Lawsonia intracellularis
tcagaactttagtaatataacatttgatggttagttagtattataggattaagactattataaattttttaattaggtaaaatagttactaacatatttaaaaaagaacatttttttcttattatatcaacggattattatatcttcttatatataagaagctaggttagttgaagaaaaaagtttagttgcgtaatgta

SEQ ID NO: 7550 - DNA, 200 bp, Lawsonia intracellularis
gtggagattgtctcctactgttaataaatagttttttataattaattgtattaatgtagaaattatttatagggtgtttctttttataggagttcctatgcatggtttatttttattaaaaggtctaatcattttatggggtattggtgctgggttaataagttgttcttcaaatgaacaagcaagtatgccagctccac

SEQ ID NO: 7551 - DNA, 200 bp, Lawsonia intracellularis
ttgttgaagtgatgaccattgaatcaaaagatacgcctattgttttaacatttgttggacaaacagaaggctcaaggtctgttgaagttcgtgctcaggtttcaggcattttaatgaatagagcctatgaagaagggcaatatgttgaaaaaggacagcttctttttgaaatagaacctgatacctataaagctaactta

SEQ ID NO: 7552 - DNA, 200 bp, Lawsonia intracellularis
gagcaagcccaaagtatgatggagcaagctaaagcaaagtttgttcaagctcaacaggaacgcgatcgtattcttccattgtataaaaagaatgccgttagtcaaaaggatcgtgatagtgctgtagcttcttataatgctgcaaaggcagatcttgatgctgcaaaagctgaagttacagaagctaaaattaaattagg

SEQ ID NO: 7553 - DNA, 200 bp, Lawsonia intracellularis
atatgcttatgtaaaatcacctgtttctggttatgcaagtaaagaaaataagacaataggtaatcttattacggcaggttcatctagtgatagtttgcttacagtggttaatcaagtaaatcctatatatgcaaatttttctattccaagtcctcaatacatgcatataaagatgttaaagtctgaaaatcttcttacta

SEQ ID NO: 7554 - DNA, 200 bp, Lawsonia intracellularis
ttgataatcctacggcaacaatgacattagcagatggaagtatatataaagaaacaggtaaagtaacttttattgataaacaagtgaatccatcaaccagtgttgttgcagctagggcagagtttattaatccagacgctcatgtgttaccaggacaatttgtacgtgtgaatgttcaaggtgttatattagtaaatgct

SEQ ID NO: 7555 - DNA, 200 bp, Lawsonia intracellularis
attttaataccacagaaagctctcattcaaacacagaaaggtactgtggtggcagttgttaacaaggaaaataaagtagagatgcgtccagtaagaattggacaaaattatggagaaaatttttttgtatatagtggactctccaatggagatcgtgtgattgttgaagggaataacaaggcaatccctggtcaacctgt

SEQ ID NO: 7556 - DNA, 200 bp, Lawsonia intracellularis
acgtctaaaagaatctatacaacccgcaatgaatgaagcaggcggtaagaagtaatgagtaataaggagaatattacagaagtgaaagaaggattttttcttcgccgtcctattttctctactgttatttcattatttattacatttatagggatattagctattttttctttgccaattgagcagtatcctaatttaac

SEQ ID NO: 7557 - DNA, 200 bp, Lawsonia intracellularis
acctccacaggtagagataaaaacaacatataatggtgcaagtgctaatactgtatctgaaagtgttgcttcagtccttgaagaacaagtgaacggcgttgataatatgagttatatgaactctgttagtgcaggaacaggtactatgactcttactgttacctttgatgtaggtacagatcctgaagaggccactatta

SEQ ID NO: 7558 - DNA, 200 bp, Lawsonia intracellularis
acgttaataacagggtacaattagcaactccaaaacttcctcaagacgtacagcgaacagggatttctgttttaaaaaaatctccagcaattttacaaattgtctttcttacttctccagatgaacgctatgatacaatttttcttagtaactatgcgctacttaacattgttgatgatttaaagcgtgttcctggtgta

SEQ ID NO: 7559 - DNA, 200 bp, Lawsonia intracellularis
ggggatgttcaaaattttgcaggacaagattatgctattagagtctggttaaaaccagatcgtatggaacagttaaaaattacaccaaatgatgtaattaatgctattaatgatcaaaatattcagattggtgccggacgtattggggatgagcctgtatcttcgtctattggggtaacttggcagataattacaaaggg

SEQ ID NO: 7560 - DNA, 200 bp, Lawsonia intracellularis
tcggcttgaaacgccagaacaatttgaaaatattattcttcgtacagagcctgatggatcaatcttacggctaaaagatattgcacggatagaacttggtgctcaagtttacaattttacaggtaggcaagatggacttgctgctattcctataggcatttttttagcaccaggtgctaatgcacttacaacagctgaag

SEQ ID NO: 7561 - DNA, 200 bp, Lawsonia intracellularis
ctgttcgtgttaagatgaaagaattatcaacacagtttcctgttggtgtagcctacgatatcccttacgatacaactacatttgttaatattgctatcaaagaagttgttaaaacattatgtgaggcaatgtttcttgtttttttagtggtttatttatttctacagaattggagagcaacacttataccttgtttggca

SEQ ID NO: 7562 - DNA, 200 bp, Lawsonia intracellularis
gtaccagtgtctattgtaggtacgtttgcaggtatgcatctattaggtttttctattaatacattaacaatgtttggacttgtccttgctattggaattgttgttgatgatgcaatcgttgtattagaaaatgttgagcgacatatatctgaagggcagccagtgcatatagcaacagctaaagcaatgtcagaagtaac

SEQ ID NO: 7563 - DNA, 200 bp, Lawsonia intracellularis
tagtgctattattgctattgtgcttgtgttatgtgctgtttttatccctgtagcttttataggcggccttgctggacgtatgtaccaacaatttgcaatcactatcgctgtctctgtagtgatttcaggtgttgtagcattaacttttactccagcgttatgtattgttttattaagaaattatgaaccaacaactagta

SEQ ID NO: 7564 - DNA, 200 bp, Lawsonia intracellularis
gtttttttaaaaattttaatgattggtttgctaatataacaggaaagtatattcatattgttaaggttttattacgtcgtactttattaactatttgccttttttgtttagtattattaggaaccacagcacttataaaaattgttccaagtggattagttccagatgaagatcagggatattttatatctttagttatg

SEQ ID NO: 7565 - DNA, 200 bp, Lawsonia intracellularis
ctgcctgatggagcttctctttctcgtacttctaagactgctagtatccttgagcaacagcttattaaagattcttctgtagagcatgttatgagtttttctggattagatgctattagtggtgcttctaaaacaaatgctgctacaatatttgttacacttaaaccatggggagagcgaaagaagaaagatgaatcttc

SEQ ID NO: 7566 - DNA, 200 bp, Lawsonia intracellularis
ttttgctattgtccggaaagtgtttgggctaggtagtgagatacctgaaggatatgttgttgcttttaatcctccaccaataagtggtatgagtaatactggcgggtttgagttgtgggtgcaaaatcgtataggagctagtgaagttgagctttatactatgatacagaaggtacttcaaaaagctcggggacgtaagg

SEQ ID NO: 7567 - DNA, 200 bp, Lawsonia intracellularis
agttacaaggactaaatagttcatttggtgtaaatgccccacagttatttatagaacttgatcgtgagcaagctgaaactttgggagttagtatttcagatgttttttcagctatgcagtctacatttggctcctattatgttaatgattttaatctatatggtcgaacatttcgtgtatatacacagtcggagtctgac

SEQ ID NO: 7568 - DNA, 200 bp, Lawsonia intracellularis
tacagagctcttccagaaaatataaaggaagtttatgttcgtaataggaatggagagatggtgcctattatctctttactaaaggtaaaacctattgctggctctcaaattatagaacgttttaatggttttcctgctgctaaaataatgggaagtcctgcatctggatatagttctggtcaggctatggatgctattga

SEQ ID NO: 7569 - DNA, 200 bp, Lawsonia intracellularis
gtctgtagcaaaagaagtcttaccagaagggtatacattagcgtggtcaggttcttcctaccaagagcgggttgtgagcggtggtggatcatttgtacttcttttatctttaattatggtatttctcatccttgcagcacaatatgaaagttggtctttacctttgacgatattaacagcagttccttttgcagcttttg

SEQ ID NO: 7570 - DNA, 200 bp, Lawsonia intracellularis
gtgctatcttagccatttggttaagaggaattgcaaatgatgtttattttcaagttgctctaattacacttgtaggtttatcagctaaaaatgcaattttgattgttgaatttgcagtagaaaaatatcgtctagatggaatgaatattattgatgccattgaagaggcttcacgattacgttttcgtcctattattatg

SEQ ID NO: 7571 - DNA, 200 bp, Lawsonia intracellularis
acatctttagcatttattcttggatgcgttccacttgctattagtaccggagctggagctgccagccgtcatgcaataggaacaagtgttattggtgggatgttattggctacgattattgcaccattatttatcccattctttttccgctggattatggtgatttcagaaaaattttcaagtaagaaatccactcagga

SEQ ID NO: 7572 - DNA, 200 bp, Lawsonia intracellularis
gtaatccatgaaaagattgttactctgtattataacatgtgttattgtatcaagttgctcttttgctccagattacaatcgaccacatttagagttacctgaggtatgggttagttcaccagagacaggagttcctgcttctatgcagtggtggaaacgctttaatgattctacacttgatattttagtagcagaagctt

SEQ ID NO: 7573 - DNA, 200 bp, Lawsonia intracellularis
tgcagcataatagagacttaattgcagctgtggccagagtagattatgcacaagctcagttaggagttgctcgatcagatttgtttccacatttttcaggaaatgctcaagcaacacctgtatgggtagatcataagagggttacagatggacaatctccatatagcgcaaacttttcagcaagttgggaaattgatatt

SEQ ID NO: 7574 - DNA, 200 bp, Lawsonia intracellularis
tggggaaagatacggaatgccaaagatgctgcattttctcaattaatggctacagaagcagaaaaagagggtgtttttctttctattgctgcccaaacagcaaatgcttattttttgttgaggagccttgacttacaatgttctattgcagagaggacagtaaaaacacgtgaagatgcattaagtatctatactgcaca

SEQ ID NO: 7575 - DNA, 200 bp, Lawsonia intracellularis
atatcaaaaaggatttattaacaaattagatttaactcgagcaaaaacagaagttgagacagcacgtacagcactttatcaaaaacgtattgcacaagagaatgctgaaacagctttatctgttttgttaggccgttctccacggttaattatggacacagcaattgagcgtggggtatctatgaaagatttatcttgta

SEQ ID NO: 7576 - DNA, 200 bp, Lawsonia intracellularis
ttcctgttattcctcaaggtattccttcagagcttttagaaagacgtcctgatatacgtcaagctgaatatacgttaaaagctactagtgcaaatattggtgtggcaagagcagcttggttaccatctatttcattaacaggattatttggtattgtaagcccacatttaagtgatttattaaaaaatcctttaaaaaca

SEQ ID NO: 7577 - DNA, 200 bp, Lawsonia intracellularis
tggagttatggggaaactggaactgtgcctattttagattttggtcaggtatactataatgtggaagcagcccaggcaaaagaacgtgaagcattagctaactatgaaaaaacagtacaaaatgcttttaaagatattcatgatgctcttatacggcaatatgaatcaaagaatatagttaattcacttgaacgaatggt

SEQ ID NO: 7578 - DNA, 200 bp, Lawsonia intracellularis
gaaagagttacgtatagctgtacatcttgcacgtactctttacgataatggttatacatcttatcttgatgtgttagatgcagaacgtgctctttttcaaagtgaactagatcttgctagtgcttggagtgatcgcctatcttctattgtacaagtttgtttagcattaggaggcagttgggaataataattatgtgttt

SEQ ID NO: 7579 - DNA, 200 bp, Lawsonia intracellularis
agttatattatctctttttctatgtatatagtagcagtgtgtaatgtgttttagagttattgctagacaaataatttattctctattatatattaactaattgtaacttaggagtcctacatggcccataaaaaaattgaacgtaaaaaagaacttgatagacggcgtcaacgtcgtgccaaacgccttaagaagcgtat

SEQ ID NO: 7580 - DNA, 200 bp, Lawsonia intracellularis
caaggagaataaagctgctaaagctactaagtaaatttttagtctttaatttatgaaaataaattgtgtcattattttttaatgatcattggaccagcggtttcgtttatcgtcaccgctgttgtttttaagtccatacatgttgtggagctagtatatgccaatttatgaatattattgtacacaatgtgataatacct

SEQ ID NO: 7581 - DNA, 200 bp, Lawsonia intracellularis
ttgaagagtggtcaaagaatgcgtcatctcatgaacataaaaagtgtcccaactgtggtggagatgcaaaacaacttatttctaatacagcgtttatccttaaaggaagtggttggtatgtaacagagtatggaaataaaaaaagtgaagagcagaacaaaaaaaatacttccgataaaacagaggtgtcatctgactct

SEQ ID NO: 7582 - DNA, 200 bp, Lawsonia intracellularis
tctagcactacattagagtcttctggtgatggaagtagttctacagagactcataagacaccttcaataagtgagcctcaaaaaacatctaaagaaaagcctaaagttcaacagaacactaagtctgctgtaacagcatcaagtgaagtaacaagcagtaatgaagcaactattagtaagtaataattatatcctttgag

SEQ ID NO: 7583 - DNA, 200 bp, Lawsonia intracellularis
gtattataaaggttagggtttacatgattgatcgttatacacgtaaggaaatgggtcgtatttggacgttaaacaatcgttaccagacatggctacgtgtagagctagcagtatgtttagcttggaataagttgggtgtaatttcagatgatgccttcaagaccattcaggaacgtgctgtgattgatgtgaatcgtata

SEQ ID NO: 7584 - DNA, 200 bp, Lawsonia intracellularis
cttgaaattgagagtattacacatcatgatgttattgcatttttaacagctctagaggagcaaataggaccagaagctcgttttattcatttaggttgtacttcatctgatattgtagatacagcaacgtcacttttacttatagaggcaggagagcttatattaaaaggttttgataagctacttacatctattgaatc

SEQ ID NO: 7585 - DNA, 200 bp, Lawsonia intracellularis
ccttgcattaaaacatcaagggttgctttgtatgggtagaacacatggggttcatgctgaaccaacaacatttgccttaaagtttgctaatttttttgctgaaatccaacgagataaagagcgttttgtacaagcatttaatggtattcatgttggaaaattttcaggtgctgttggtacatacacatttctcactccag

SEQ ID NO: 7586 - DNA, 200 bp, Lawsonia intracellularis
aagttgaaactattgcatgtgatatccttgggcttaaacctgatactatttctactcaagttatacagcgagaccgtcatgctgaatatttcacagctcttgctattacagcaggaagtattgagcgactttgtgtagaattacgtcacttacaaagaacagaagtacgagaggtagaggaaggttttcagaagggacaa

SEQ ID NO: 7587 - DNA, 200 bp, Lawsonia intracellularis
aaaggttcttctgctatgcctcataaaaaaaatccaatttctgcagaaaacatgacagggctttctcgccttatccgaggaaatgttcttgctgcattagagaaccaagcattatggcatgaaagagatattagtcattcatcagtagagcgtgtaataatgcctgatacaactatattgatggactatatctttcatcg

SEQ ID NO: 7588 - DNA, 200 bp, Lawsonia intracellularis
tttatctgggatattagatgaattaatcgttcttccagaaaatatagaatgtaatatgcaggcctcatttggtttattttattcacaacgaattttgaatgctctaatagaatctgggatgggtcgtcaggaagcttatgtttctgtacagcgtaatgctatgcagagttgggagactaaacaaccttttcaagaagtta

SEQ ID NO: 7589 - DNA, 200 bp, Lawsonia intracellularis
ttatggatgatacaaatattgtatcttgtttaggtcaagaaatgttagagaagttattcgatactagtttttatcttcgttatgaaaaagttatattagggcgaatatttggtgaatctactttacagaaatatcaagcaaataagaaaaattaattaggaaactaatagttaggttgtgtggtaatggatattttaaaa

SEQ ID NO: 7590 - DNA, 200 bp, Lawsonia intracellularis
aaacgattagcaaaaattttttttgaacgttcatataaagaaggaaattttactttaagttcaggccgtaagagcgattattattttgattgcagacaaacagcattacatcctgaaggggcttggttaataggaaatcttcttaatgcattacttgttgatgtagatatttcggcagtgggaggaatgaccttaggtgc

SEQ ID NO: 7591 - DNA, 200 bp, Lawsonia intracellularis
tgatcctcttatttcagcaataactgttatttcatatgaattagataggcctctttcaggacttattgtccgtaaagaggcaaagttacatggaactgctcaatatgtcgaaggtcttgcaaacgtccattctggagatagagttgctgttattgaagatgttgtaactaccggaaactctttacttttagcatgcgaac

SEQ ID NO: 7592 - DNA, 200 bp, Lawsonia intracellularis
gtattaaagcttccggattgactattgctattctctgtacaatatttgatcgtgaagaaggagggaaagaatttcttcaggaagctggttatgaattacgatctctttttacccgtaaagagcttgtagaccttgcaactagtctataatgttatttaacctagtttagtgattgatagtaagttaatccttaaaaaata

SEQ ID NO: 7593 - DNA, 200 bp, Lawsonia intracellularis
ggtttcaactaataaggttatattatattttcattatatattaataggaaatgtttttttaaaggtagaggtctttctttttttatggtatagcctattgtatattgaatacatgctttcttattgttttataaagtgaagttgaatttatagtatatagtaattattatagttaactttttattagttccaatgggttg

SEQ ID NO: 7594 - DNA, 200 bp, Lawsonia intracellularis
gagttccgtaatttaatacttaggattagttgtatgtattatgagttattttaataaaataaaagaagtcagaaataaatattatttttatttattaataattggaggatgcttttttttttactataggtatccacttaacaacatttaatacttttataagtataaaagatatctttcaagtaaataaaatagctatt

SEQ ID NO: 7595 - DNA, 200 bp, Lawsonia intracellularis
gctgaaatgcattctagcatgattccaggaagaagggataatgtatctcttagaaaaccaagaaatcaggaaggtacttcgtatattagtcagttaaagaataggacagttcagtggaatgatgcttgggtaaaacgatcgttaactttttttgatttttattggcctgaagcatatacagtattccaaggtattccttt

SEQ ID NO: 7596 - DNA, 200 bp, Lawsonia intracellularis
tcaggaatataaagataaagaagtaaactcatttaaagtaaaccagtgggtagatagtttttgtggagagatccatgttgaaaaggaagcagaatattgggtttcatggtttcatcaatatttacgtatgcctaatagttctatagagggcattcgcaagctttattggaaggaaaatgaacaaggtgaattaaagattg

SEQ ID NO: 7597 - DNA, 200 bp, Lawsonia intracellularis
ttggtatgaagtggattcctcaggagcttgatttagaatcttcatatttagaaagtataacttccaaaattacagcttttatcgaagattggaggtttgcttgggaaacaggggatgttgaaaagtatgctgtttattatgccgaagattctattcagggtgataggcgtggaaaagacgcaattatagagcataaaaga

SEQ ID NO: 7598 - DNA, 200 bp, Lawsonia intracellularis
tcaacttggaatacaaggaagccaaaagaagtctttttaacaggtctgcgtgttatggctgtaaaagatggtattcaggttgatatggcacaaaggtttcatgatgcgttagcctatagtgataaaggaataaagacattattgttacgtcctactggcaaatcatgggttattgtccgtgaagattggagtgagatact

SEQ ID NO: 7599 - DNA, 200 bp, Lawsonia intracellularis
acaatgaatacaaaaagtagcatgttaagcctcattcttatgcatgacgatggtgaagcacgtagtatacgtataagcaaaagaggtctatggctactagtaatacttacaattttagctcctatagctggtcttataggtttatgggttggttgggaagcttgggaatctatgtctaactggcaacaagaaaaacttgc

SEQ ID NO: 7600 - DNA, 200 bp, Lawsonia intracellularis
ttaccaaactcagattgatgaattacgtgttcagttagaaagatttgctacattagaagcattattaaaacgtcaagatgctgcacttggtagtaaagttgataatcctcagctacagaaagaacgccaagtaaatacatcagaaaaaaaggatgtaaaaaaaactatagaggagaatgaaggagtagcaaaaaattctt

SEQ ID NO: 7601 - DNA, 200 bp, Lawsonia intracellularis
catctatgggtacaatcatgcctcctaaagctatcccccagtcttctatagtaccaacatccactggttcaggggttaaggaaatatcgcatgcttttgaatctcattcaagtgataagcaaaattatgaagggaatattcatactacttctatacaaccttcagtagttacaggaaaaagtgctcatacaacaggagag

SEQ ID NO: 7602 - DNA, 200 bp, Lawsonia intracellularis
caaagttctttcattgactatggagttgtcaaagttgaaaacgttcaaaagcagattatacaaggaaaacgtattcaagcacaaataagtttatttaatacagaaaaagttcctcaattatctggccacgttcagtttgcacttattactaatgatgggaaaaagtatgcgctctctggttctgatacaagttttcgtat

SEQ ID NO: 7603 - DNA, 200 bp, Lawsonia intracellularis
aacacgctttaaaagcatgttcatagattctgagttgccagtatcggatgcaattgcacaaaagagtaaattacttatagaagtagtttctggtgataaagttgttttccgtcaattatatcctctttctgagaaatagagagctatcttttcattttatctttttaccatatattcttctatataaactaaaaaagcag

SEQ ID NO: 7604 - DNA, 200 bp, Lawsonia intracellularis
agtttctgcttttttagtttataattattttgttgatatcactaattctaatattagtggattaaccattaggttgaaataaagtaaaataattgagaaaaaaataacaaacaggtttatttttaaataaaaataacaaactataaaaataatacaatgtaataaatttggaatcataattgcagttaaacaactgttac

SEQ ID NO: 7605 - DNA, 200 bp, Lawsonia intracellularis
ctctattattgtaactattttgaatgagattataaaatagttagcattaaatatattatatataatatatttaatagaatttaaaaaagtatgtactattattattttattcaaaataataatttaactatctcataatatattatataataatttattatgctagttaattactgttgaataatccatatgtattaatc

SEQ ID NO: 7606 - DNA, 200 bp, Lawsonia intracellularis
ttatatcttttagtttaattataatttttcatattgtattcatattctaggtgtttttattaaagctacttgacatagtgtgaaaatagtaacaatatttattctaatctagtaactgtgcagctaaatattgctttactagggggtaaagatgtctaaagagtctctatggaaaagtccatggtttaagtatcttttag

SEQ ID NO: 7607 - DNA, 200 bp, Lawsonia intracellularis
gcggctttatattggggataattgttattgtggggattaactggggtatgaaggtaacagactcaaggccattttgtgcaagttgtcacataatggagcaggcagcagtaacaaataagttatccatacatgctaacttatcttgtaatgattgccatgcaccacatgagttatggagaaaaattccatttaaagcaaag

SEQ ID NO: 7608 - DNA, 200 bp, Lawsonia intracellularis
gagggaatccgagatttttatatgaatacaattgggaatgcacagttaccgattattccaggaacagaaacaaaagaagtagttaatgaaaactgtaaggcatgtcatgctatatcaaatatgactgtctcaagtacagaggcaaaaccctattgcgtggattgtcaccgtgatatgaaacacatgcatatgcagccaat

SEQ ID NO: 7609 - DNA, 200 bp, Lawsonia intracellularis
cagtaaaaggatagtagccgatgattaatcaaattatattaaagagtgtatatgggctgttactttgtttagtggttgttctttctgggtgtggtgatgtagatacagagttaaaaacaccagaatataacacaggattacctgcagatcatttaggtaatcttgcttttaaaaaaatatttcctttacattatgcatca

SEQ ID NO: 7610 - DNA, 200 bp, Lawsonia intracellularis
tatgaattgaataatgaaagtagtattatgacagtatataagggctccgttccttatatgaagaatgataataaagatcctttaccagaaggatacaagtatgcacaaccttatttgaaaaatctttggctaggttatccttttatgtatgattatcgtgaatctcggggccatactcatgctataggagatgtcctaga

SEQ ID NO: 7611 - DNA, 200 bp, Lawsonia intracellularis
ctcagatcgtcctaatcgttatgcatttaaaagtggtcttcctgctacttgctggaactgtaagactccacagatgcttaagtggaccaaagatgatggtaatgcattttggtcaaaagatatgaatgagttccgtgaacgacttcatccagaagatgatactgtaggatgtgtcaattgtcataatccacagacaatgg

SEQ ID NO: 7612 - DNA, 200 bp, Lawsonia intracellularis
aactacagctttatagtgaacctcttaaagattatttagtatctgtaggaaaagatcctgataaactttcaaggcaagaaatgcgttcgttagtttgtgcacagtgccatgtagaatactactttgaaaagacaggtgtgcctgctaaaccagtcttcccatgggcaaaaggatttaatcctgaagatatgtatcaatat

SEQ ID NO: 7613 - DNA, 200 bp, Lawsonia intracellularis
tataaagaacatggtgattctactattcctggatttgaaggccaattttatgattggatacatccagtttcaaaaacacctatgattaagattcaacatcctgaatatgagacatggattgatggtcctcatggttcagctggtgtgacatgtgctgattgtcatatgccttatatacgaggagagaatggtcaaaagat

SEQ ID NO: 7614 - DNA, 200 bp, Lawsonia intracellularis
gtctagtcactattggacatctcctcttaaagacccagagatgagggcatgtcgtcagtgtcatgctgataaaagtccagagttcttaaaagagagtgttgtttctgtccaaaaagcaacatttgatcaattgttgatagctcaggagctttctgtaaaagcccatgaagcagtacggttagctgatgaatatacaggtc

SEQ ID NO: 7615 - DNA, 200 bp, Lawsonia intracellularis
caagagctaataattatgatcaactcatgatccaagcaagagatatgatccgtaaaggacaactattctgggattatgtatctgctgaaaatggagttggattccataaccctgtaaaagcattgaataccttggcatcttcaatacaatatagtcaagaagctattaacctggctatggaggcaacaaaatatgccatt

SEQ ID NO: 7616 - DNA, 200 bp, Lawsonia intracellularis
gggccaaaccttcaaggagatattaaagaaatagttccacctattttggttatgtctcgtaaattacaacaagatccagagtatcttaaaacaaacccttggtttaagtatctaaaagtactaccaaaagctgaaattgaatgggatggtacaaaatacttaggtgataaataacaaactctattcatataattatgata

SEQ ID NO: 7617 - DNA, 200 bp, Lawsonia intracellularis
taaaatgagcccattatactagtataatgggctcattaactaattagtttttaacatatcagaacctatgaaagactagcaacatcattttgtaattcaaatacatcatggagtgtccgaacagcaagctctgtatacttttcttctattaaacaagaaatttttatttctgatgtactaattaataaaatatcaatatt

SEQ ID NO: 7618 - DNA, 200 bp, Lawsonia intracellularis
ttcatcttttaatgcattaaaagcttttgcagcaaccccagcatggtttcgcataccaacaccaatgagagaaacttttgcaacattagtagcacattcaacgcttttccctccaatagacttaattagctcttccattagattacatgctctagttagatctttacgagatacagtaaaagttatgtctgtcagattat

SEQ ID NO: 7619 - DNA, 200 bp, Lawsonia intracellularis
ttctacttgaagcttgaataatcatatctacaaggatgtgttgttcagctagaggcccaaatattgacgctgctgttccaatgtgatgtggaatatcacagagagtaacacgtgcttgatcattatcatatgcaatactagaaacaagaacagcttccataattgaattctcctgagtaaccattgttcctgatgcgtta

SEQ ID NO: 7620 - DNA, 200 bp, Lawsonia intracellularis
ctaaatgtagaaagtacttttatagggacattgtatttttttgcaaactctacagatcgaatctgtaatactttagcacccatagaggccatttcaagcatttcgtcataactaacatatgcaagctttctagcttttgtacataagtttggatcggttgtataaacaccttccacgtctgtataaatttcacatttgca

SEQ ID NO: 7621 - DNA, 200 bp, Lawsonia intracellularis
tgagcctaaagaagccgcaatagctacagcagaggtatctgaacctccacgtccaagggtagtgatttgtccttcttgtgtaactccttgaaatcctgctataataagagcatcataatttttaagctgcttataaagcatgtctccattaatggaaataatccttgcttgtccaaagtcattatttgttaagataggaa

SEQ ID NO: 7622 - DNA, 200 bp, Lawsonia intracellularis
tttgccaaccaagtaaggaacgtgtttttataccttgcttgttaagtaatagactaaaaagtgtaatagatgcatgttccccagtagaaagaagactatcaagttctaaagggtcagggttttctgcacatgagtgtgcaagctctaataatgtatttgtttttcctgccttagctgaaaggacaacaacaactttaaat

SEQ ID NO: 7623 - DNA, 200 bp, Lawsonia intracellularis
ccgttattaagagcattagtcactttctgttgcacttgttttagacattctaatgtagcaacagaagttcctccaaatttttgtacaagaatttgcatagagttatactataggtgaagagagattttgtgtattcattagctttaattggattacctgttgatgttgtatcagagagtcaataattttagctgagatta

SEQ ID NO: 7624 - DNA, 200 bp, Lawsonia intracellularis
ctccatgatgataacacgatatttgtcgagtatttttttcatctagtgaaagagaaaaaataatacactcagtaggaaatagttcttctgggagatattctgcccattctatgattactaacccttggtgatcataaagcaattcatatatctcttcagggattgtatgagagcagcgataaagatcacaatgtataaca

SEQ ID NO: 7625 - DNA, 200 bp, Lawsonia intracellularis
gtaggatttgttggataatagttacaaatagtaaaactagggcttgagacttcagcatattcattatacaggaaatgttgtactaatccacgagtaaaggttgttttgccacttccaacttctccgtagagtaaaataacaggcataaaagaatagtttacaagaagagttgctatatattgtccaaaataagtcatact

SEQ ID NO: 7626 - DNA, 200 bp, Lawsonia intracellularis
attcgggttagaaatagtaaatattacagagggaggagaattttgtgtataagtttttgtaactatagaggacataggtggtgtgttctgcaaattattatacataggcactataataactgggctttacaaggaattcaatagattcttgtcaaggatataaaaaatattgttgcatgaattattgcttggaattaata

SEQ ID NO: 7627 - DNA, 200 bp, Lawsonia intracellularis
taacaagataagtagacttgtgaagcaaaagagagtatgagttttagtagatggaacaatatcatggtcttttggttgtaaataagcctcaaggaattacttcagcagcttgtacgtattatttaaaaaaaatggggcaaagaaaaattggccatgcaggaacattagatcctatggcacaaggtgtgttgcttatcctt

SEQ ID NO: 7628 - DNA, 200 bp, Lawsonia intracellularis
ttaggacatgggacaaaaatttttaactatcttcttgaaggaggagaaaaagtatataaggcaacagtttgttttggacaaactacagatacttgggatagagaaggaaaagtccttacaacacagagttgggaacatattacttcagaagaggttagggaacatattttttcttggaaaggtataaacaagcagcttat

SEQ ID NO: 7629 - DNA, 200 bp, Lawsonia intracellularis
cccaccatattctgctgctaaatatcaggggcagcctttatatgctttatcccgtaaaggggaaaacactccacataaaacaaagaaaatagaaatttcatgtgtggaagttcttactattaacctcccatatgtaacctttcgagttacatgtagttctggtacctatatacgctctctagcccacagcttggggatgc

SEQ ID NO: 7630 - DNA, 200 bp, Lawsonia intracellularis
gaatgaggtgtggggctgttctcacagagctgactcgagagtatagttatccttttgggcttgatacagcaattccatttgaggatcttgtaaccaatccagatttattactagatcggattattcctattacagcagcattgcctgactggtcaattgttgttgttaataaaagtgaggtttcacagattaaaaatggt

SEQ ID NO: 7631 - DNA, 200 bp, Lawsonia intracellularis
attcccctttttagaagagatacaacatgtctctcaggtaaaaagacagtacttttgctggaagatggaacacctttagcacttgctgaagcaatgaatacttctaatggagctgtatggactttactcagaggattatggacataaaacctaaaattataatatgaggaaattgctgtggtaatggatgcattacaaaa

SEQ ID NO: 7632 - DNA, 200 bp, Lawsonia intracellularis
aaagagtattattaatgtatatgctaaacatgagggcgatacaggttctccagaggtacaggttgcattattaactgctcgtatagaagttcttacagagcattttaagttacacaaaaaagattttcattctcgtcaagggttattaaaacttgtaagtcgtcgtcgaaagttacttagctacctaaaaagtagaaata

SEQ ID NO: 7633 - DNA, 200 bp, Lawsonia intracellularis
ttcaatcttatcgtgatgttattgcaaaacttggcttgcggaaataataattgttttattgggggagaattccccctttttattatatttatattataatctataaattttatagattataattagtagtataaattttagatatagtaagaaaggttacataattcaccaagttgttaatgagtaattttataaaatta

SEQ ID NO: 7634 - DNA, 200 bp, Lawsonia intracellularis
ttattttgacttacggttattatagtacttttttgacataaaaaggaaatgtatgagctttagaaaaccccccattcgtttagctactcaagttggtggtaaagaaattatttttgaaactggttatatggctacacaggcaaatggttctcttacagttcaatgtggtggtaccattgttcttgtaacagtttgttctc

SEQ ID NO: 7635 - DNA, 200 bp, Lawsonia intracellularis
aaccccttgagtctgacaagggttttttcccccttactgtggaatactcagaaaagatgtatgctgcaggaagaatccctggaagcttttttagacgagaaataggacgtcctagtgaacgtgaaacacttatttctcgactaattgatcgtcctattcgtccaatgtttcctaaaggcttagcagaagatgtccaaatt

SEQ ID NO: 7636 - DNA, 200 bp, Lawsonia intracellularis
ttggctaatgtaatttcttcagatcaagaaaatgaatctgatattttagcagtaacaggggcatcagcagctgtaatgctttcttctttaccttttgagtgtgctatagcagctgggcgtattggacgtttaaatggtcagtttgtattaaatcctacaattaatgaaatagaattaagtgatttaaatattgtttttgc

SEQ ID NO: 7637 - DNA, 200 bp, Lawsonia intracellularis
tgcgtcttcagaggctgttgtaatggttgaaggtgaagcaaatgttgttgaagaggaaatcattattgaggctcttgaatggggtcataaagaaattcagccaatcataaccctccaaaataaaatccaagaacttgctggacgaaataaaataccatttgttcctgttgaagagaatatagttttttctaaaaaagtag

SEQ ID NO: 7638 - DNA, 200 bp, Lawsonia intracellularis
aagaattagcggataaatttggtatagtagaagctatgcaagttaaagaaaagcaatttcgtaaagaagctcgtaaagctgttaaggaaaaagtgttagctatattaaaagaagatcctctttatgctgaacatagtgatatacttaatacagtaagtgaaattattggaaatttagaaaagaagattgttcgtcaaaga

SEQ ID NO: 7639 - DNA, 200 bp, Lawsonia intracellularis
atagtaaaagaaaatttacgtattgatggacgtgatacaataacagtgcgtcctatagcaattgaggtaggtttacttccacgtacgcatggttcagccctctttactcgtggtgaaacacagtcattatgtattacaacattaggaagttcaacagataatcagagagtagattcacttgcaggagatacagttaaaaa

SEQ ID NO: 7640 - DNA, 200 bp, Lawsonia intracellularis
ttttatgcttcattataatttccctcctttttctgtaggagaagtaaagcccgttcgtgtatctagacgtgaaattggtcatggtgcattagcagaaaaggcacttaaatatattcttccttctcaaaatacgtttccttttacagtccgtatcgttgctgaaacattagaatctaatggctcttcttctatggctgcta

SEQ ID NO: 7641 - DNA, 200 bp, Lawsonia intracellularis
tatgtggtggttgtttatcattgatggacgctggtgtcccaatttctgctccagtggctggtgtagcaatggggctgattaaagaagatgatcaatttattgttttaacagatataattggtgatgaagacgcctttggtgacatggattttaagattgcaggcacaactaagggtattacagctgttcaaatggatatt

SEQ ID NO: 7642 - DNA, 200 bp, Lawsonia intracellularis
aaaattactggcttgactacagatgtaatgcgcaaagcaatggagcaagcacgtgaggctcgtatacatattcttagtgaaatggcaaaagcattagatgtcccacgttctaacctttcacagtatgcaccacaacacgctgagcttgtagtaaatcctgatgctattcggatgattattggtcctggtggtaaaaatat

SEQ ID NO: 7643 - DNA, 200 bp, Lawsonia intracellularis
taaacagattacaactgttactggtgcagctattgatattaatgatagtggaaaaatttcaatttttgctcctacatctgaagcaatggaacaagcaaaacagatgattttatattatgatcaacgtccagaattaggtaaaaactataaggggaaagttcgtaaaattttagaaataggtgctattttagaaattatgc

SEQ ID NO: 7644 - DNA, 200 bp, Lawsonia intracellularis
ctaatgtggaagcatttgttcatatttcccaacttgctgttgagcatattgcacaggtgactgatgttgtacagctaggtgaagatatgataattaaagttattgaaattacaggtgatagagtccgtgcaagtcgtaaagcagtattactagaagaagaaggtataacttggactcctgaagagagtagtcgtttttct

SEQ ID NO: 7645 - DNA, 200 bp, Lawsonia intracellularis
aaaggaaatcgtaatggtgatcgtagtcgtcacaacaatagagaacgtacacgtcggacataacttttattaagaataactactaggttatataggctgattgattcttcttactaaagaaaaatcaatcagttttgattatactatattattaaaagtagtaaatttttaacttaggttattttgataatatattatga

SEQ ID NO: 7646 - DNA, 200 bp, Lawsonia intracellularis
agtgcttgattaacaagtgctggattagcttgtccctgcatttttttcataacttgtccaataaaaaaacttaataattttgtttttccatttttatatgcggctacttcagtaggattttcagcaagaacttcaactacaattgtatcaatagtctttgtatcagaaatttgtgttaagccatgttttattacgtaatc

SEQ ID NO: 7647 - DNA, 200 bp, Lawsonia intracellularis
tttaggcattaattgtttgctaaataaatcttcaaagatatcatgagcaattttgatactaataagattttcatcaataatagctgcaagttcagcaattgcttcaggcttcattgtacattgttggattgttatattatgctcattaagcatatgtaatagtaatattttaataaggttagcaatttttttaggttttg

SEQ ID NO: 7648 - DNA, 200 bp, Lawsonia intracellularis
ggtataatttaactgctttttcaaaaaagtcagcaagttctcgacttgatgtaagtatttctgcatcctgatgagctaaaccccattctattacaaatcgtttttgtcgactatccgataattctgggatttcacctttccatttttctatttcctgaatagtaacataaataggtactaagtcaggatcaggaaaatat

SEQ ID NO: 7649 - DNA, 200 bp, Lawsonia intracellularis
ctgtaatcatgggctgtttctttatctctcataggggtagtgatatctttatcactattataaagacgagtttcttgtattattgttttaccatcttctaatatatcttgctgacgattgatttcaaattcaagagctcgttgaacatttcggaatgaatttaagtttttgatttcagttcgagtccctagatgtttaga

SEQ ID NO: 7650 - DNA, 200 bp, Lawsonia intracellularis
attatatggtcgtaaagaaatatttgcatcacatcgaaagttgccttcttccatatttccatcactgataccaagatatgttacaattgcatgtaagctttttaaataagcaacagcttcagaaggagtatttatatccggcttactaacaatttcaataagaggtactcctgctctattaagatctataaaacttttat

SEQ ID NO: 7651 - DNA, 200 bp, Lawsonia intracellularis
tttcatgaggagagtgaatactctttccagcatcattttctagatgaatttggtggatccctattcttttattgttattttttatagtcagatcaagatatcctgaagtacagagagcatgggtaccctgagatatttgatatccgtttggtaggtcaggataaaagtagttttttcgagaaaaaaaagagtgagtatta

SEQ ID NO: 7652 - DNA, 200 bp, Lawsonia intracellularis
attgtacaatgcaatgcaagtccagctttaactgcgtattcaacagctagtttatttagggatggtaatgcaccaggcatacctgcgcagatttcacatatattagtatttggtggagttccaaatgttgtagggcaagagcagaagagtttagactttgttccaagctgaacatgtacttctagcccaatgacggcttc

SEQ ID NO: 7653 - DNA, 200 bp, Lawsonia intracellularis
aaagtgactcatgtatagatttctcccttattaggatgttagtgaatacagttgtgggttaagagaaggattgttatacatcttatattggaaataaagtttaggttttcggattccttggtggaattcgtttactaggtttaggatagcattattaagatcaatatgttgttcttttagtacatgtaatttttgtttac

SEQ ID NO: 7654 - DNA, 200 bp, Lawsonia intracellularis
aattttcaatatgttcaatagtaacgtcgctacgttcgacctgttcattcatatgccatatctttaggcttaaaatagaagagcgatcaatagccattcctaatgactcagtatttgtatgtacattgttagtattagtaggtagtaatggttgaataaggttaagaaaagctatatcaatttgttccataaaatcgttt

SEQ ID NO: 7655 - DNA, 200 bp, Lawsonia intracellularis
cgttgttggtttaattgatcaatagatcgtttacattctgcaatcagtataggttctatatcacgccgacgtgcaatatcttcttcatgccagattttaaaattaaatagatgttgaataacaacaagttctttaaaaatagatggagtatagacagtttttagtttgggtggctcaatttcaggtagttcttcatgcca

SEQ ID NO: 7656 - DNA, 200 bp, Lawsonia intracellularis
aagcatagttttttgtgtttgtagttcaaaacattctataagcatagttatacaatcgtgtatattcatcagaaaaatatccttagaaagtttgttattataacgattggaaagttatatttgtttttttgttgaaaagacttttagttgtttgacctatagcttaattttgttatattaatctgatattactaacattt

SEQ ID NO: 7657 - DNA, 200 bp, Lawsonia intracellularis
agtttacacaatataaaaattatatgttttattaaatagtaaaataagttttttattttttatagttaagagtaatttcaatccgttatagtttgaacggtaatagaattgttattaatccacttgactatatttgtttttaacgaaaaattacataattatccagtatgttactcgtataaactaatgggaacaggaac

SEQ ID NO: 7658 - DNA, 200 bp, Lawsonia intracellularis
atacaaaagattgaagatggctcattaatgcatagtggccctatgtatttatttctatttataactatagagtagaggaggcagaatatactggtataatttagtatagttaattaccatttattttttaacttttttatgtatataaaaaaagttagttattttgatagataataaatgaaatacaaaagcaaaaagta

SEQ ID NO: 7659 - DNA, 200 bp, Lawsonia intracellularis
aagaatgctatattaatattaagaaacatttttttatttaacgataagagataataataaatacaataactatacttagtataagtttcgttaggttattgatatctataagttaaaatctgtggaagataaaagaccttttttttgtaggtgttgtaaatagctatagttggctgtagtgtatataagaagcccacttt

SEQ ID NO: 7660 - DNA, 200 bp, Lawsonia intracellularis
ttattccttgaattccaacactatcattgggtttaagtacaaaaccttcttgtccatcgactgtaaggaatggttcaatagcatgaggtgaaggtgtaagcgtaattgttgttgatagaggtaaaactagcggaggtgtacttctgaagagtgtcgatacagaggtcagtgtaagtgcttgcacatcaggatgaactaat

SEQ ID NO: 7661 - DNA, 200 bp, Lawsonia intracellularis
ggtccatgagcagaaattgtataaccagaggtcccaagaggagtagaaacaagaataccatcagagcgaatcactccaatatgatgtttattaatagaaacatcaacagcaagaactcgtgcaagagctccacgtcctactacaacatcatttatagcaaaaccattttttataacttgattatgacgaattattgacca

SEQ ID NO: 7662 - DNA, 200 bp, Lawsonia intracellularis
ggaaaggactatttttttttgaagaacaagcttatgagaataaagttgttcaagcatttgtggccagttttcaggatgaatttctacaagaaaaccaacttgtccaaagttaatacctaaaacaggtatttgtttttcaataaggttacgggaaatactaaggaaagttccatctcccccaagtataatagctacttgtg

SEQ ID NO: 7663 - DNA, 200 bp, Lawsonia intracellularis
tatgaacaagtgattgttttaattgtgactcaggaatatcagatgaaaagagatttgaggttacattcttattataaaaccaatgttggatatcatgtgctgttttttctgcttgaggatttcctactttatatacaataagggcatgtttaagcgttttcatattaaatgttgttaataatattttttagtgtgaataa

SEQ ID NO: 7664 - DNA, 200 bp, Lawsonia intracellularis
ttagtttttatagttaagttaaaatcatttgttattagtataatctttttattatgctttatcattaaagatatatgttatcttagttaagataacaagctataataaagaataacacagagttatagttgtcaccatgagatgatcaacttattcttagctgaaataaaaaaaattagaaagctatttattttatgtga

SEQ ID NO: 7665 - DNA, 200 bp, Lawsonia intracellularis
aaaggagtagtcctagtttcatgaataaagcatttcaacttattacttcccatttagaaacaggaataaaattacgttctgaattttttactgctcatgccagtacaatagttgagatggctcgacaaattgcttcatcagtagcatgtgggggtaaaattattatagctggtaatggtggtagcgctgcagatgctcaa

SEQ ID NO: 7666 - DNA, 200 bp, Lawsonia intracellularis
cactgggcaggagaatttgttaatcgctttcttttagatcgtcctccattaccagctattgcattgactacagattcttctattttgactgctattggtaatgattttggatttcatctcatctttgcaaagcaacttcaggcaattggtcaacaaggggatgtttttttaggtatttctacatctggtaatagtgtaaa

SEQ ID NO: 7667 - DNA, 200 bp, Lawsonia intracellularis
tcttattgaagcactgcatgtagctcgtaaacaacgtattaccacagttggattaactggcaagggaggaggagggatggcacctttgtgtgattttttgattgatgtccctcatcaatcaacccctttagttcaggaggtacatgcaactattggacatatgctatgtatgttaatagattatttcctttttgagaacg

SEQ ID NO: 7668 - DNA, 200 bp, Lawsonia intracellularis
tttcagctattcaaccattattaaacgatccagcaccacatgaaaacaatgaataatatttttttatgaacagtaggagatatttcatataaatatacttagtaagtatgatatgtaaaaagaagtagaaaagttaattcagtaactataagaactaatataaatttcagtataactagtgtataaaagtagtaagttta

SEQ ID NO: 7669 - DNA, 200 bp, Lawsonia intracellularis
atataaactattttagataggaaatagctgtgtattagtaaactaacaacactcttataaagattaattattaagattaattagcatctacagagtagtttatatttaaataatgtgactattaaggtattaaatataatattatgctatgggagtaacataatagttgctattaatactttaatagttaggaataaaaa

SEQ ID NO: 7670 - DNA, 200 bp, Lawsonia intracellularis
tgaaaaagatcactattgctacaagaggaagtaaattagctttttggcaggctaactacattaaagatcaattacaaaaaatgtattcttatcttgaagtagatttaatggttattaaaacaaaaggtgatcatattcttgatgttccactggcaaaagttggaggaaaaggtctttttgttaaagaaattgaagaggct

SEQ ID NO: 7671 - DNA, 200 bp, Lawsonia intracellularis
cttttatctggagaggctgattgtgcagttcatagtatgaaagatgtccctatggagttaccttttgaactttgtttagctgctattacagaacgcgaagatcctacagatatgtttctttctataaagtatagtggtgttaaaagtctacctgaaaatgcattagtggggacaagtagtctgcgaaggcaagcacaact

SEQ ID NO: 7672 - DNA, 200 bp, Lawsonia intracellularis
tttagcattacggccagatcttcaaattataccattaagaggtaacattgatactagactacggaaacttatggcagaagagtttgatgcaattattatggcaactgcaggaataaaacgtttaggccttatagcaccatatatgtcctcattgccttgtagtgttatgcttcctgctgttggtcagggagcccttggga

SEQ ID NO: 7673 - DNA, 200 bp, Lawsonia intracellularis
tagaagttcaaaaagaaagacaagatgtattggagctattttcttttttaaatcataaagagacatatcattgtattcaagctgagagagactttttagcaggccttgatggtggatgtcaggttcctattgcaggttatgctactatttgtaaacaagaaactatctgcttagaaggtttagttgctaagagtgatggt

SEQ ID NO: 7674 - DNA, 200 bp, Lawsonia intracellularis
tctgttatgatccgtaaccggttagaaagatcagtaagtgatgcatatgatattggtatgacattatcaaaaatacttcttgctgaaggtgcggatgatattcttgcatcaatgcatactatcctgtaacttctaatagttatgacataccagcatagttgataatcttagtttttttaacagttagaattttttaatac

SEQ ID NO: 7675 - DNA, 200 bp, Lawsonia intracellularis
gtttttggagtaccatgtggctaaagttttaccattacctgtatctcgtctttgtgcaagactctcgcctgaccgaatcccatgggaagtaagtagtgaaattcctaaaaatgtatctcaccgtctatctcttcagcctcgtgtgcataaagcattagagcgtgcacttgctataacgatttcaggttataatatatatc

SEQ ID NO: 7676 - DNA, 200 bp, Lawsonia intracellularis
tttcgggagaagcactgcttggccggtcatatctattaaaggaatttttagtcccacgtgctaaaaaaatgcagacaccaccagatttactttttgtacataattttaatgaagtagacaaaccatgtttactcactgttccttctggacaagggaaaaagatacaaacaggattaacaaaggttttgtctgaaattcgt

SEQ ID NO: 7677 - DNA, 200 bp, Lawsonia intracellularis
aaacaagttcctttgtggcttgaaaatgaagaatatattaagaagcataatacaataaaagataagttccaaagtagccgtaataaacttcttaaagaaatgcgaggagtggctaataaacaagagtttaatgtagatcttgatgaacatggtggattaacattatatccgctagttgaaggaaaacgtttaagtgaaga

SEQ ID NO: 7678 - DNA, 200 bp, Lawsonia intracellularis
tgagtttaatcgattagacgttaatcttaggcaatcattaaagcaaaaaggagataacttattaagttcaatgtcaagtatggtacgaaaattaagaaatgcagaaaaaacattccaatctgcagaaaaaaatcttgatcaagaagtaattacaaatcttcttgataaactttttgtaccttttgttgaagaagtattac

SEQ ID NO: 7679 - DNA, 200 bp, Lawsonia intracellularis
gacattgtcctgataacaaatcactaaagaattattttaatgaattacagaaagatatttttgagcacccagagtccttcatcacacgtgataatgcttctatagcattacatcagcaacatgatgttagtcagttatgtcctacagaaacagagcaatataggtattatattaatatttttgtagataatagtaataca

SEQ ID NO: 7680 - DNA, 200 bp, Lawsonia intracellularis
aaaggggcacctattgtttttgaagatcatcctactgctacacatttgttaggttgtatagaaagagaagctgaaatgggtgcattaataactgattttacacttataaagtcagggtcgttgcataaagctaatggaggttttcttatattacatcttgatgatatattacaacatcctttagcatgggaaggattatt

SEQ ID NO: 7681 - DNA, 200 bp, Lawsonia intracellularis
gcttgcattgcgttcaggtgtttcaacattagaagattttggagagacaacagatggaactatacgtacaaaagggattgaaccagaatctatccccttagatgtaaaagttattcttgttggaaatgaggatttttatgaaagattattggagcatgatgatcgttttagtaagctttttaaaattaaagctcaattaa

SEQ ID NO: 7682 - DNA, 200 bp, Lawsonia intracellularis
ctactacaactgaaagaacagctaaaggaatccgaagttggctgttccaattatctaaaattatagatgatacaatgctattaccttttgatgctgaatcccttgcaggacttgtagattatagttcaagagaatgtgaggatcagaaaaagctttctttacgttttcctttaatacgagatgtaatgattgaagcatct

SEQ ID NO: 7683 - DNA, 200 bp, Lawsonia intracellularis
gctattgcaaatatggcaggcaatgagcttgtgcaaaaaattcacttagatgaagctattgcttctaggctgaatagagtcaacttagtagaagaactctttattgaagaatatgatcgtgatcttataaaagttatgacaacaggatggagtgttggtagggttaatgggttgtctgtatcttggtatggtgattttga

SEQ ID NO: 7684 - DNA, 200 bp, Lawsonia intracellularis
gtttggattaccacatcaaatttcttgtacagttggtgtcggtcatggaggaattattgatcttgaacgtgaatcagagttgggtggtcctatccatacaaaagctatgcttattttgaagagctatttagttgatcaatttgcaaagaaaaaacctcttgtacttacaggtagcctttgttttgaacaaaattatgctg

SEQ ID NO: 7685 - DNA, 200 bp, Lawsonia intracellularis
gagttgaaggtgattctgcttctggtgcagaacttgctgcattactttcagctgtatcaggtgttcctttgaaattatctcttgcctttacaggtgcagttaatcaatcaggacaaattatggctgtaggcggggttaatagaaaaatagaaggtttttttgaaatatgttcacgtagagggcttacaggagagcaaggt

SEQ ID NO: 7686 - DNA, 200 bp, Lawsonia intracellularis
gtaattattccttatgataatattgatcatctaatgttaaatcctaaagtcattgaggcagtcaaagacaaaaagtttgctatttatccagtaaaacatattacagaagcattagaacttttaacagatatgccttcaggccgtcctttaaaaaaaggaggtttttctccaaactcgttatatgataaagttgatagcag

SEQ ID NO: 7687 - DNA, 200 bp, Lawsonia intracellularis
attacaagagttaggtcatctagctgagcatgcattcagtaaaacttatagaaaaaaaactaggaaataataatcagatagttataactactagttaggaactataacttgttttactttgacttttaaaaggttagttatccaaatacaaccaatagaataaagagctaggcaaataaagcctatcccaaatgttaggt

SEQ ID NO: 7688 - DNA, 200 bp, Lawsonia intracellularis
gttccccacaatatccaagaaacattgttatccctccatttgaaataagacctgagcttgtcatagacaaagacattaacagagcttgttggctaagtggaaagcgtatagcaaaagccttaaagatagaagggaaaagacatgatatcgaaatggtttggaagatgatacctataatagatagtgatggaatatcaaat

SEQ ID NO: 7689 - DNA, 200 bp, Lawsonia intracellularis
gccatagcggtaagggctaatgtatgaagaattaggcaaaatttaatgataaagtatacattaaaacgatctgacgcccatcctcctaaaattacaataaagggagtaattagccgtgaactagatataaggatattagaacttcctggtgtaaaccctacctcatctgtgagatataattgtaatatgctaaagacact

SEQ ID NO: 7690 - DNA, 200 bp, Lawsonia intracellularis
atattctccagcttgagcaataataagtagtataacaacagcccaacttgctggggtaaaaagaagctctttataaccagagtaagatggtaaagggacatgttcttgtcctcctctaccaaaaaatataaaaagtatactaagtactaacataggccaaccaaggtaagcacaaacaccttgccaattagtaacttgta

SEQ ID NO: 7691 - DNA, 200 bp, Lawsonia intracellularis
aaaataattgagctaataaaggaataagtataaaattaagattagctgcaacttcatgaatacttatagcttttccccagtctgagggataaacaagtgttgataggactgctattcctgccggaaaataaaaaccacatccaaaacctagtaatgcaaaaagtaatcgagcttcactaagtgtctccacataaggcatt

SEQ ID NO: 7692 - DNA, 200 bp, Lawsonia intracellularis
aagcataggcagatacttgagaagaagacggaaaaggctaccatatgtgcaggagtaatctttgagagtaaaaatccacaggaaaaaagactaatactatatcctatactctgcataagaagaaggcttgtagattgtatatggcctatttgaagactattttctacatagacaagtaatggggctaaggtagatcgagt

SEQ ID NO: 7693 - DNA, 200 bp, Lawsonia intracellularis
catataactacataaaaataatagagaaactgcgcttatccaaggcagtgcttcacgaaaaggcattgggagagtatagtcatgtttaaacatatatgaggttacttaatagtagcttgttgtaagtaaaaaattaaaaagatattagcatactaatgaattattgaattaattctagtataattttttcaatgttcaag

SEQ ID NO: 7694 - DNA, 200 bp, Lawsonia intracellularis
atagataaagaaataataaagataagaataacatcaagctatgaatgagtaaatatattgttattacatatagcatctatcgtataatatatagataattatgacatattacatgttatagttataggaacaattctaatgaaatagaagaagatcgttattacttgtctttaaatggagttcaatgtatttgttatact

SEQ ID NO: 7695 - DNA, 200 bp, Lawsonia intracellularis
gtgctgagtaatgcttagattaagtataatgcatataaatattgttagagtaaggcatagaaggttacaacttatgtataatacacaaaatttatctttaagaacttttttttctcctcaaatattacctgttaagtcaaaattttctcaagtttctgcaattcaaaaaactgttattcttacaggttggcttgaagagc

SEQ ID NO: 7696 - DNA, 200 bp, Lawsonia intracellularis
ataaggcacagaatgtgctagcctttgatgtagtaaataaaaatttatgtatggatattgtagtgattttaacagctacgtcttctcgtcatgcaaaaggacttgcagatggaatccttgaggagtgtacaaaacaaaattttgaatatcttcgaatggaagggtatcaatatggtcaatggattttagtagatcttaat

SEQ ID NO: 7697 - DNA, 200 bp, Lawsonia intracellularis
gatatagttataaatattttccaggcagggatacgtgagttatatgctcttgaaactctttggaaagggtgtcctttattaaatggacaattagccactaatactctttaatcaaggatgtatttatgaatgtagtgccaatactattactaattcttgatggttatggtcttgcacctgatagtactggtaatgcagct

SEQ ID NO: 7698 - DNA, 200 bp, Lawsonia intracellularis
aaattagcgtttacaccaaacattgatagaatgttagctatgtcaggtggaactcaaatacatgcttcaggtcgtgctgttggtcttccagatggatacatgggaaactctgaggtagggcatcttaacataggggcaggtagagttgtttatcaacaaatgacacgtattgatgtagctattgaaaataaagagttaga

SEQ ID NO: 7699 - DNA, 200 bp, Lawsonia intracellularis
tagtaatccaattttacttgacctttttacaaaagttaaatcatctaatggtcgattacatcttttaggattgttatctaatggtggagttcatagccatattagacatcttgaagctttattatccattgctaaagagcataatattcaagtgatattacatccttttatggatgggcgtgatactggtccaaaagatg

SEQ ID NO: 7700 - DNA, 200 bp, Lawsonia intracellularis
gtttaaaatttatgaaagaaattgtttcatttttaacatctacatctagcggggtaattggtagcttttgtggccgtttttatgctatggatcgtgataagcgttgggaaaggatcaaacttgcttgggatgcaattgtacatggagtaggcttgcatgtggaagattctgttaaagcattagagcaggcgtacgcatct

SEQ ID NO: 7701 - DNA, 200 bp, Lawsonia intracellularis
ggagaaacagacgagtttataaagccaagagtcatgggcaattctagtgtaaactgtgttcaggataatgatgcagtattattttttaattttagagcagatcgtgcccgagagcttgtcagtgcttttatccttccagattttaatggatttgatcgtggccgtgttccccatttatcagggattgcaacaatgacaat

SEQ ID NO: 7702 - DNA, 200 bp, Lawsonia intracellularis
gtatgacaaagagtttaatattcctgttctttttaatcatgagaatataactaaaacattaggtgaagtcgtttctgctcttggattgttgcagttacgtatagcagagacagaaaaatatgctcatgttacatattttttcagtggaggacgtgaagaggttttcacaggagaagaaaggatacttgttcaatctccaa

SEQ ID NO: 7703 - DNA, 200 bp, Lawsonia intracellularis
gagatgtagcaacatatgatttaaaaccagaaatgagtgtgatggaagtaactgatcgcttactaacagcatggaatagtaagaagttttctttgattgtgtgtaacttagctaatccagatatggttggtcatacaggaaatattaaagcatctatttctgcacttgaagctgttgataactgtgttggacgtatagaa

SEQ ID NO: 7704 - DNA, 200 bp, Lawsonia intracellularis
aaagcagtagctgaacagcatggttgttttattttaacagcagatcatggtaatgtggaagaaatgctggataaatctgggcagccacaaacagcacattcttgtaaccctgtccctttgatagcaatatatgatgggaagcctcttaaccttaaagaaagtggtaaacttggagatattgcaccaactattttgagtat

SEQ ID NO: 7705 - DNA, 200 bp, Lawsonia intracellularis
atgggacgtttctattcctaatgagatgacaggtaataatcttctttcatcggagtgataaagtatgcatgaacaaaatcgtcctatatctcctgtatcaccatcaggaatggaacttctttttatctataagtgtccacattgtggaaggaaaatgcctcttatttcaccaacacaacctgcaatgactcaatgtgatt

SEQ ID NO: 7706 - DNA, 200 bp, Lawsonia intracellularis
catgtagcttggcctttccacttgttcctgttgatgaaaggactattcattatttaaaaattatacttgctcagggtagagctgctgttgatcctgactttatttaagaattaaatacaaaccttaaaataaataaagactgaaaaaatttttttcagtctttatttatttatttatttgttatgctatatgaggaggta

SEQ ID NO: 7707 - DNA, 200 bp, Lawsonia intracellularis
atctattgagcaataattgaaagtttatgtaactcattatctagcattgaagttgcttgtccaacagatagtttataaccttttaaaactttttgttgtttttttgaagctgagagttgttgctggatatttgttttaagttttgttccttcttgtataagttcttcttgtaatgtttttatagcaagtaattttgatcg

SEQ ID NO: 7708 - DNA, 200 bp, Lawsonia intracellularis
aatttgttcattttcagcatcacgaatattccatgcattttctaagagttgagcacggtgattacaatattcatcagctttttctacttcttcagcttttaatgcatctaactccagttggccaatatgtaatgcttcatcatacaatgctagacttttagacatactaagctccaagattattttggatagctttgcgt

SEQ ID NO: 7709 - DNA, 200 bp, Lawsonia intracellularis
aactcttcaataataatattccaacgttcacaagcaggaattaactcatattctaatagatctgcaagcatgatccaatcttcttgttcaagcacgtctgtcatttcgcttaataaagatgaaatttgttcactgcaatctgcaaagacgttatcgtctgtaacaataaagtcagttcgtaatacacttaccattgtcat

SEQ ID NO: 7710 - DNA, 200 bp, Lawsonia intracellularis
aaaatctcttataacatctagtaagtcttgaaaaagttcaagtccttcatcatcttcacctcttctaaagtgttgagcaacttctttgctgcctgtagcaataaagttagaaacttttaaaagttcttctgtaatattatatgccatctctccaaaaggaatagagcgtatttctacagaatttatttcatttgttggaa

SEQ ID NO: 7711 - DNA, 200 bp, Lawsonia intracellularis
tatcttctgcttggtgaggatatagttcagagaagagttcatcatttaacaatacatcagtaacaattctattttcaagacgtgaatcgcttgctgcgtaaagtaaaatttcttcaaggttagaaaaatttttaatttgcatatcagttttattaccgtcgattataatcataatgcctcctcatatgctattaatagta

SEQ ID NO: 7712 - DNA, 200 bp, Lawsonia intracellularis
gttacaagatatcttgcaagaggtgagccattattttagagaattattccattttgtaatgattttttgaaaggagttagcaatagttaatacatgtgataaattgtcagcatgttcatggatcgacattttccagaatatccctagtgcagtaaataattcgttttgttcaagtagttctgtaatattataggtagtag

SEQ ID NO: 7713 - DNA, 200 bp, Lawsonia intracellularis
aaagaaattttttaccaaattgtgaaatatgtttttcagaaaggagaaggccttgttgttctaataacttgagaaggctagatatctgttctagagtattggatgcttgttgcctaacattctgagataactgtgagataacctttgtagataaaggacgataactttttgttgtattagggttatctaacaagtcaata

SEQ ID NO: 7714 - DNA, 200 bp, Lawsonia intracellularis
agttgacgataataatatcgttggatatacaaccaactacttctatcttctttatcatggccagacagagattgaagattaaaaaaaccataatgatctcttgttgttatccatacccgcgctacagtagatgtttcaattggtgctttttcaggccattttttgttagttaaacgataagtaagaagtggccagatagc

SEQ ID NO: 7715 - DNA, 200 bp, Lawsonia intracellularis
atcagcagaaattgtagtacgacagattgtatcaataggacatgtggtatcaaagtcacaagggtgacaatttaatgatggctcaagacaacaacagtcttcaagatatggaccagtatcatatggttgagcagttgcaagaaagatagcaagagagggtatacccattcctgcagctaaatgcattgttcctgtatcat

SEQ ID NO: 7716 - DNA, 200 bp, Lawsonia intracellularis
ttgtaataagaagagagatatgtaataggatagctgcaagttctgcaatttttgtttttcctacaaggtcaatacatggagcaccagttttgatgtattcttgagcaaggtgttgttcagattcgctaccaaaaagtacagggataattcctaattgattatataacttttttcctaattgtgcgaagtgagatacaggc

SEQ ID NO: 7717 - DNA, 200 bp, Lawsonia intracellularis
cattgacgcaatgttgaactagcaccaagttgaaatcctagatattgtttattggtttcaaaaatatgatttttaaagtgtgttgttgaggttagtaaatttgttttttggggaagtttaagtttatagcatgcaggaatatgttcaacatgagatatcattctgaatagatctacaagattgtatggactacatcgtct

SEQ ID NO: 7718 - DNA, 200 bp, Lawsonia intracellularis
tttttttgttgaagcttcaaagagttttgcccacattgagtcacttacaccaaacccgtatttatcgacactaaatccttctactggaataattgattgtgaaagaccgtaagctaagagacgagcaggaatatgaggagtaagattgagaattcggtttggcgggaatgtattatagatttgttctatccattcttgga

SEQ ID NO: 7719 - DNA, 200 bp, Lawsonia intracellularis
aattagcaagagcataaatccaattttgttcaatcaatgatagtaatttccccccagagataggattcacatatgttatatgtgataaacatgatgttgcatctacaaagctggatagacaaataagtccaacttgatatccatcttggtgaagtgctgttataacaggttgcgtctgtattaagtcaccaaatcttgat

SEQ ID NO: 7720 - DNA, 200 bp, Lawsonia intracellularis
aggttaataacgatagcatgcataatataattattatatgcataatgtaacagatgttaaactaaaaagataaaaatatcagatgatagaagatagtaaggaagttcagtttataacagtctactattactattttatatttgattattgtagattatatgaaaagtttagtataatcataagaatggagcccttgagca

SEQ ID NO: 7721 - DNA, 200 bp, Lawsonia intracellularis
ggattgaactgctgacctcatccttaccaaggatgtgctctacctactgagctacaagggcatagtgtcaattttgtaaaaagtttctatgtcatattattatagtaagtcaagttcgtcagagggttcagatccactagctgtattgcacacacctctttcactattgcgaataaaacgaataatactttgaacttctg

SEQ ID NO: 7722 - DNA, 200 bp, Lawsonia intracellularis
gaacatctggatattttttttctaaagttttaagtgattctggtcgagggatagtacttttccaaataagcttgaatgtatctttaactgctgcaatagttgttgaaggtacattagcacgtcttaatcctacaaggtttggaccatgtattatacctttcctcccagttataagcatccaggggggaatgtcttggcta

SEQ ID NO: 7723 - DNA, 200 bp, Lawsonia intracellularis
attcctgtcattccaccaataaaggcatgttcaccaattttgcagaactgatgaacagctgataaacctcctaatatagcaaaattatctatatgcacatgacctgctaaggttgaacaatttgacataacaatattactaccaagaatacaatcatgggctacatgtgtataggccataaaaagattgttattcccaat

SEQ ID NO: 7724 - DNA, 200 bp, Lawsonia intracellularis
tttagttattccaccacctccagcagtcccacggtgtaatgtagcaaactctctaattttgttataattaccgatttctaaccatgttatttcaccagaaaattttagatcttgaggttgtcctccaaccatagcatgtgaatgaatatgattatctgttcctatcctagtgtattgtttaattactgcatgagaatcta

SEQ ID NO: 7725 - DNA, 200 bp, Lawsonia intracellularis
tatatgttctatctcctacattaacatcatcttcaataattacataggggccaatggttacatcaatacctatttgtgctgaagaagcaataattgctgtaggatgaatagttacagacattaaaaattttccttgtttgtcattgctgcagttagtattgcttctgccacaagcttattatttacaaatgcctggcaag

SEQ ID NO: 7726 - DNA, 200 bp, Lawsonia intracellularis
acattttccacaactgtagtttatggcgaattatttcacactcaagaataagttgatccccaggaataacttgttgacggaattttacattttctatccctgcaaatagaaaaactttaccttgtagttcattaataggaaaagattggagtactgtgattccacctgattgcgccatagcttctaaaattagaactcca

SEQ ID NO: 7727 - DNA, 200 bp, Lawsonia intracellularis
ggcatgacaggaaatccagggaaatgaccctgaaaaaatggttcattaatactaacatttttataagctttaatatatttgccagcattaaattcaataactctatctacaagtaaaaagggataacggtggggaagtaactgtagaatttcttggatatttggaggtaatggatgggacattaatttttcctatatatt

SEQ ID NO: 7728 - DNA, 200 bp, Lawsonia intracellularis
atgctcttttttcttttctaaaattttttcaagcttttttatacgcttaaagagctctgggaatcgtggcataagtacagatgtttttaaaaaagtttgtcggtcaactgcagggcttcctcctaggatttgattgtcagggatatttttaccaataccagattgtggaccaatagtaacattattacctatagtaagat

SEQ ID NO: 7729 - DNA, 200 bp, Lawsonia intracellularis
ggcctgaaattcctgcttggccggcaagaatacaattatcccctatagatgtagaaccagatataccaacttgtgaaacaataacagtatttttaccaactgttacaccatgtccaatttgaacaagattatctattttagtgttttcatttatagtcgttgttcctagggttcctctatcgacagttgtattagctccg

SEQ ID NO: 7730 - DNA, 200 bp, Lawsonia intracellularis
atttccactttatctttaataattacatttcctacttgaggaattttttgtttttcttctgtaagtgcgaatccaaacccatcagagccaaggactactcctgcatgaataatgcagtcatttccaattgatgtgtttgccataagtactgtattagggtaaatagtacaatttttcccaatatgacaatgttcaccaat

SEQ ID NO: 7731 - DNA, 200 bp, Lawsonia intracellularis
gtatacacctgggaatagagtagtattttcttcaataacagtatgtgatcctataaaaacaaaaggatagatagtagctgttttagagacttgtgctgtagggtgtatataagcttgatgacttataccatcaaaacatccttgaggtatagagaataaagaaagaactctaccaaaatctctatatggttcagtactga

SEQ ID NO: 7732 - DNA, 200 bp, Lawsonia intracellularis
ttagtgctcgtggaacacgactagcatattcttttgaaagaataatagcaccagcctgtgacaaaacaagctggtgaatatatttagcatttgctagaaaacttatctcatttggtgatgcatcttgaagtgtatttacgcctacaacttcaatatcatcaccttgtaatgttaagtttaaaagtttagcaatttctgaa

SEQ ID NO: 7733 - DNA, 200 bp, Lawsonia intracellularis
agtttatactggggcatctgttattttttccggtttgccatctctggaagtttacttccaccttttttccatgcagcatttatggcttcaagaatttcttttgtaatatctagatttttttcaaggtacattacacttccactagcactatcaagaacaagttttaaccctttcttttttgctatagtttcagcagcaag

SEQ ID NO: 7734 - DNA, 200 bp, Lawsonia intracellularis
atagatttgttcagctagatattgacgtaatgtgttttcagcttgttcgacacgtattgcaaagtcacgagatttttcttcgaaattacgacgaagttcaagaaattctctttgtttatcttcacgtgcttggttagacatagctgctgacttagcttgtaaatcatcagcttttgtttgcaaatcttttgcttgttttt

SEQ ID NO: 7735 - DNA, 200 bp, Lawsonia intracellularis
caagttgtgttttttcattaccaaattctgattgtaattttttttgagcggccttagctgcttcactctccatggcaatggattgagaattaaagacaccaatagggaagtcagccgaaaatgcactgttagctactaataaacaagctaaaatagccatggaaagagtttttactttcataatgaagctcctctgaatg

SEQ ID NO: 7736 - DNA, 200 bp, Lawsonia intracellularis
aataaagtatggttgcataatttttacatttaaaagcttacaggtaaccttcacatggatagccttcatataataattcgtcaagctattaagtgcaattagatagaataaaactagagtaaatatcaaggtgattgtagtttttttaggtaacagaaaatacctttagctaatccttctattaatgctttttggtaatt

SEQ ID NO: 7737 - DNA, 200 bp, Lawsonia intracellularis
actagatgccagacgctgtgcttcagctttattactacagtaacctacttcaacaagaatacttggtattttgggtcctataagaacatgaaaaggtgcagattttatcccaccattgtgagtattataatttttttgtataaggtgggtaagaatattttgatgtacagactctgcaagtctacgtgattcatgctttt

SEQ ID NO: 7738 - DNA, 200 bp, Lawsonia intracellularis
ttgatgttaacatcacatcttttaaaagtatatcaagatcatttagtgttttttcacttgtagaattttcaattcgggcaatatatgtagactctttagatcttgcaagtccaaggtagtatgtttcaagaccatggatttgtgtgtttttatttgcattaatatgaatagaaatcataagatcagctttaactgtagtc

SEQ ID NO: 7739 - DNA, 200 bp, Lawsonia intracellularis
gctttccgtgagcgagcttcaagtgctacccatgtgttattttgtcttgtatagtgtacagtaaaaccttttgcagctaaaatttgaccaagttttttagaaagttcaagagtcaattcactttcaataattccattatgtgtagctccaggatctttgcctccatgtcctgcatctataagtattgtttttactgttaa

SEQ ID NO: 7740 - DNA, 200 bp, Lawsonia intracellularis
gccgagttgttgtgcaagatcgtgtgccacaataggttttggagaagtggattttgggtgtgaatgttttgtttggccaattttcattccatttgctattccatcaggagtaggtgatgtgtaaataatgagctgaaaaggattatgtgttgtttccactttaaatgtttttagatcactaaaatctagcaagagttttg

SEQ ID NO: 7741 - DNA, 200 bp, Lawsonia intracellularis
tgacagttggagtggagagatccactcttagtttttctagtttgttttgtttaatacatattcctggttttatacaaggatttggaattgtgttgtgtaattctataagtaaacggataggattacctgttttagggtttgctggatgagatattacatcccatgtgataggttctgtaagagtaataataagtttaaga

SEQ ID NO: 7742 - DNA, 200 bp, Lawsonia intracellularis
tagctcttttttacttcccatctgatattttcaagttgtgctaatgttttttcggaagtttttttttgtaaatgagaatttttttgtttggatgttgagtggaaagcttcttttgctttagatgtgcttgtagtcgaagttttttgaggttcctctttaaggttttcaaggctttttaagtatatctgagcttcgtttat

SEQ ID NO: 7743 - DNA, 200 bp, Lawsonia intracellularis
tttatcacttttaggatagtctgttaataatttttggagatactttttggcatcattaggtttatgaagtcgttcagcataaacttttgcaatatttagtaatgcactttcagtaatagttcttttaggatatttagttatgacagattgataacacttaatagctttttcagcatcagaaactgtgaaagaatgttttg

SEQ ID NO: 7744 - DNA, 200 bp, Lawsonia intracellularis
caagttcgtcaagggcaacagctgaataataaagtgcaaaaggacgattaatccaatcaggaaatgaagtatatattttaaaaaatagatcagaaatttttagccaaggatctctaagtttttgatttatagaatctgactgaagattttttaatgcttttttagcttcttcataacgtgcacctggacttgtaggtgca

SEQ ID NO: 7745 - DNA, 200 bp, Lawsonia intracellularis
gctgcttgtattatgttattattggttatgacaataaagtaagctaggataggtatccataacagttttttccaataaatataattggataaaattgcaatggcttgtcgacaaatgatgttgctcatgcttgcattgaagagaatatgttatattcatctatttcctagtgcagtagttatggcataacaacattttta

SEQ ID NO: 7746 - DNA, 200 bp, Lawsonia intracellularis
tggggcggctccctgcacctctcatctttaaatttatagtatctcttattttatgagttatattatgttattagaagaattgccccattgaaaattcaaatctaccacgagtttttttgccactaacatttttattgagtggtataccataggcaaatcgcaaatctcccattggtgaacgccagcgaagttcaaggcca

SEQ ID NO: 7747 - DNA, 200 bp, Lawsonia intracellularis
tatgattgtttgagtttagagaatgggttagaagtttgtacagaatctgtttggaatcctatgtcatagaatggaactaatgcaagacctagctctggctggaatgtccaaatatactctaggttaagaaaagccatcctatcaccaccaatttcatctccaaagcgaggatcttttggtgcaagatcttctgtatcata

SEQ ID NO: 7748 - DNA, 200 bp, Lawsonia intracellularis
tcctctaatactatctataccaccaataaaaaatcggtcaaatactggcacaggttttttactattcttataagctgcacctgcacgtgtacgccaatgtattatatggtttttacttcttgaaattgagtaaaatccttgtagttcagcaattggcttgaagaagttatcattaccaccaagaccaccacctccatatt

SEQ ID NO: 7749 - DNA, 200 bp, Lawsonia intracellularis
caacaattagttttgcaatatgccctttagatggtctctcacgactgtctgtagaatcaaaagtaaaaccaccacttactacactagaaatatttttcccttgatagtcaagataagagcgtggtgctgtagatggaatatcatatagacgatattgatcaattcgatagccaacaaagatagatgaatattctcctata

SEQ ID NO: 7750 - DNA, 200 bp, Lawsonia intracellularis
gggtgaaatagacgtatggtatctccataagtttttttacggaagtcatcccattcatctcgtagcgtataaatgttattactaaagccaaagtctgtatcataaacacgaggattggtaaaagaaagatcaagagaagatgacttactagaaataaaaccttcaatacttaaaatataaccttttccccataagtttct

SEQ ID NO: 7751 - DNA, 200 bp, Lawsonia intracellularis
ttctgagatacttcctgaaacaccaaatttagaatgtgttgagtaaccaacaccacctgtgattgcacctgttcgagcttcttgaacttttacaagtagatcaacttcatcatctttccctgtaggcagtgtatctgtatctacttggttaaaatagccaaggcggttaaggcattcattagagcgtcggagatgttgac

SEQ ID NO: 7752 - DNA, 200 bp, Lawsonia intracellularis
cattaaaaagatctccatcagcaaggcgtaattcacggaggataacattatctctagtacgagtatttccttcaacaattattctacgaagaaagactttttgttttttatcaataaggaaagtaacatcaattgttgcatcttcttcatttttggttgtttcaagatctacttcagcaaatgcataaccataatctgaa

SEQ ID NO: 7753 - DNA, 200 bp, Lawsonia intracellularis
taaaaatctgttaatgcttttacatcatcttgcataacagaaagagaaaaatactgctcatagtttttatgatcatcaatttttgttactttaaggagttgttcatttgtctcaataagatctcctttaaagtctatttttcctattttatagcgcttaccttcttttactctaaatgtaataacaattcctttttcatt

SEQ ID NO: 7754 - DNA, 200 bp, Lawsonia intracellularis
gaatgttacttcaggtgaagcaacttgaatatctacatagccatgattcatggcataggcagagattgctatagagtcacgttcaagatattcttcacgtaatacacctgttccagtaaaccatgataaaaaattacgttctgttaatgctaactctttttttaaagttttagcttttattgtttcaagtccttcaattc

SEQ ID NO: 7755 - DNA, 200 bp, Lawsonia intracellularis
ggacatctttaatataaagttttttcccttcatttactgttaacaatagtgttgcagaagaagtattttctttctcttttatttcataattaacttcagcgagatagtagccttcttttctatagaggtcggtaattttttgaatatcttgggacaatagtctatcactaataactgatccttttttagaactcattgca

SEQ ID NO: 7756 - DNA, 200 bp, Lawsonia intracellularis
gcaagaatgttatcgatacttacagcttttgagccttgaacaacaacatctgtaattttaggcttttcttgtacagtaaatacaagtaatcgtccttccccgctttcttcaatacttgcagagacatcactaaaatatcctaattcccatatttttttgatttctgcattaattttggcatgatcagtatgatctccctt

SEQ ID NO: 7757 - DNA, 200 bp, Lawsonia intracellularis
attaatagtgagtcgtgtaaggattacatcaggatcaagaactttaagcccatgaatacgtacatcagcaatagtgtttttctttataaggccattacttatacgttcagcaagttctgttacagcaatatttagctcattaaattttggtttttctatgtataatggacgtgcagatgctacacctgtactatcaataa

SEQ ID NO: 7758 - DNA, 200 bp, Lawsonia intracellularis
gcctactatcaatactaaaattttcacctgtttgattgaaactgccgtatactacatagtcagcatggagttgttgagctaccttttttgcagtagaaatattaagttgggagatattttgtttatatagaagatttaatgcagatttattagggatgacacgaaatcccttattctttaatgcagttgcaagaagcatt

SEQ ID NO: 7759 - DNA, 200 bp, Lawsonia intracellularis
ggtagttctgtttgtaactcttcatcatttgatgagccattaatttgaaatgggagaaccacaatagaaggatcgtcttttgaagcagcattggctattatattacaataaagtatattacacagtaacagtagaagaaatatattcaggcgttttgtcatgtagatctccggacttcagctcaaggcagcgtcccatag

SEQ ID NO: 7760 - DNA, 200 bp, Lawsonia intracellularis
aatgggcaatatcattattatgtgtgactacaataagagttatattaaaagttttattaagtgagattagaagattggcaatgtgttcacctgttttttgatcaaggttgcctgttggttcatctgcaagaagaacttggggttctaataaaatagctctagctatggctacacgttgacgttcacctcctgacaacatt

SEQ ID NO: 7761 - DNA, 200 bp, Lawsonia intracellularis
gttattctgtgatggtatttattttcaagtcctacactaccaagtgcttctcgtgcaagcagaagagctttcttttttggtataccagcaataagagctttcattgcaacattttcttcagcagagaattctggaagtaagttgtgaaattggaaaataaatcccagtagtttattacgaaagcatgctttttcatttgg

SEQ ID NO: 7762 - DNA, 200 bp, Lawsonia intracellularis
gcccatatgacttaaatttttattattaaataacacagtgccagaagatggtatatctaatgctccaaggatatgcaatagggttgatttcccagaaccagatgcaccaataatagctaatgattctccgtgagctatagaaagatttattttatgtaagacacaaataggttcagaaggactgtcatactgttttacta

SEQ ID NO: 7763 - DNA, 200 bp, Lawsonia intracellularis
tattttctaatagatattgtgacatttttactcgtaccttaatccttcaataggctgtagtcgagccgcttgatgggcagggtagagagtagcaaaaaaacatagtagcatggcagaagtaccaataatgaatatatctagccaattaagtaatactggcaagtgatctattgtatataccccagggggaagtttaatga

SEQ ID NO: 7764 - DNA, 200 bp, Lawsonia intracellularis
attgatatttctgcaataaaagtgcaagagtaattccaagtagataacctagcaaagttcctacaataccaataatagttccttgtaaaatgaaaatacgacggatcatttggcttgtagcccccatggaggttagaatagcaatatctcttgttttttccattacaagcataattaatgttgtaacaatagaaaaagaa

SEQ ID NO: 7765 - DNA, 200 bp, Lawsonia intracellularis
ccaatgagaacaaccatagctaatataataaacattccaattttttcaagcttaagtgctgcaaataaatttgcattcatatccatccagcttcgtacagaaaaattatgacctaactcttgttgcagttggtttgtgatataatttgcttgatacacatcatgaatactgacttctattccagaaatataattgtgagg

SEQ ID NO: 7766 - DNA, 200 bp, Lawsonia intracellularis
tagtccaagaagttctcttgctgcattaagagaagtaaatgcaagagaagtgtcatattcaaacatacctgtatgaaagattcctgttacaataagtggtcgtatccgtggctgaaatcctgaagatgttttttgtcctgttggtgagagtaagtttacacgactacctattgttacattgagtctttgggcaagctcat

SEQ ID NO: 7767 - DNA, 200 bp, Lawsonia intracellularis
taccaataataataccgtctggagtccctaaaactttagggataagatcttcaagatttccttttgttagatgagaaagcatagaaatgacattttgtgctgatgagggatctatcccccttaaaataagaccttttactccatgaggagaggatatcatacattctgcataaataaagggagtagcacctattatcgca

SEQ ID NO: 7768 - DNA, 200 bp, Lawsonia intracellularis
gaagtttgttgaagtttatttaggataataagagcattttgggacagcatagaagtagttgacagctgagtaaaacttgtaggttcttctataggtgaatcaaagtttcctgtaataataatatgtgcattagctccaagaattttgtcacggatatctatagtaaacccattataaacccctaatacaactacaagaga

SEQ ID NO: 7769 - DNA, 200 bp, Lawsonia intracellularis
ggcaacaccaatagcaactcctaaaattgacattaatgaaataagataaatgaaagcttgttttcgtcttgcaaagagataatgtagagcaataaaaagttcaaacttcattagcgttctgttcgtaatagagggaaaaggataacctctcgtatggaaggagagtctgtaagaagcataacgagtcgatcaattccaat

SEQ ID NO: 7770 - DNA, 200 bp, Lawsonia intracellularis
accttcccctgctgctggtggcattccatattctaatgcacgaagataatcttcatccatgggacatgcttcttcgtctccacgtgctttctcaagaacttgttcttcaaaacgcagacgttgatcaataggatcattaagttctgaaaatgcattagcaatttcttttcctgcaataaaaagctcaaaacgatctgtta

SEQ ID NO: 7771 - DNA, 200 bp, Lawsonia intracellularis
cttctgggttatctttattttttttggagagtggagagatatcagtaggatagtgatagataaatgtgggttgaatcagtttgttttctacgtcaaggtcaaagagtttagcttgaagttttcctattttgtcagttgtcagaactttttctccatgttctttaatatattcactaactttttcaaagttattataaaac

SEQ ID NO: 7772 - DNA, 200 bp, Lawsonia intracellularis
tctggagaatgcccaccaattttttcaagagactcatgaaatgtatatttttgccatgtcccaggtgtaaaatcgattgtatttccttggtaagatatagtcatagtaccacagattttttttgtaaggtatgcaaacatttcttctgtaagttccataagatctagatatgttgcataggcccagtaaaattcacacat

SEQ ID NO: 7773 - DNA, 200 bp, Lawsonia intracellularis
ggtaaattctggattatgttggatagagattccttcattacggaagctacgatttaattcaaatagtttttcaaaaccaccaacaagaagccgctttaaatagagttcaggagcaatgcgcatataaagggtcatatccattgcattattatgtgtagtaaatggacgcgccattgcaccacctggaataggttgaagaa

SEQ ID NO: 7774 - DNA, 200 bp, Lawsonia intracellularis
taggtgtttctacttctataaagccattttcttctaagaatgctctaatttcatgaataattttactacgctttctaaagatatctcttgttttaggattaacaataagatctatatatcgctggcgatacctaagttctatgttagtaaggccattatgtttttctggtaaagaacggaaggacttagctaataatgtg

SEQ ID NO: 7775 - DNA, 200 bp, Lawsonia intracellularis
atagtggagcagttgagagttaattctcccatttttgtacggaaaagttttccattaacaccaacaatgtcaccaatatcaaactttttgaatgtactaaatgcttcttctcccatattttcacgagatgcataacattgaatgcgaccgcttctatccatgatatgaaagaatattactttaccaaatgaccggagaga

SEQ ID NO: 7776 - DNA, 200 bp, Lawsonia intracellularis
gataatacgtccagcacaagcaaaaatttcgtctagtgattcaagttcagatgcactataggcttcatattcagcacgaagcataccagcataatgctctttaacgaactcatctgggtagagaggaattcctgagtctaaaagctcacaggattttactacacagtttttgataacttcattaagctcatttttttctg

SEQ ID NO: 7777 - DNA, 200 bp, Lawsonia intracellularis
caaggctctcaagcagaggtttaaaataagatacatgaggtgacttggtagctaatttaattgggggatgagatttttttttctgtatcaatgaatgcttctccagtaatacaattaaggcgtattctatatttaattagcggtagtccaaaagagcttgatagtcaagaagataaaatgagtcttgaaaaataaaaagc

SEQ ID NO: 7778 - DNA, 200 bp, Lawsonia intracellularis
ttgactgtatggttttgtttagataaacaccaacttaagttaagtagcgttccccggtagctcaataggcagagcgggtgactgttaatcactaggttggcggttcaagtccgtcccggggagccaaaattaggtattatgaagggtgtcaaagtgtaataatcctttttggtaccttttcctctcaatgtccagccatg

SEQ ID NO: 7779 - DNA, 200 bp, Lawsonia intracellularis
tttggttgcatcccaaagtttgtaggtatatctctagacatggccatgctatgatccattataatattcacatggacaactgtttgtggttacagaatttttgtccacataggtattgcaaaattcaaagagatgtagggagttgacgatgcccatcaccgatatctacattcacagtttgaatcctaatactagccctg

SEQ ID NO: 7780 - DNA, 200 bp, Lawsonia intracellularis
taaatattttgatagtagtgaatctaagactatcggcctgtttgcatgctttgtgggtgaatttgaagtaatgtttgtaggtgtggaaccggtttttcatttttttcattttttttgaaatataataatatatctgaaaaatatcagtagataatttaatgctaggaaagtggttatgaaaaatttttttgttttattgt

SEQ ID NO: 7781 - DNA, 200 bp, Lawsonia intracellularis
atattatggcgttgtctgtagtacacgtttcggcatcatccttagaattattcaaagatcaaagcggagttttagatatagctggtggtacagcacacctccctgtaatgaagcaagctgctaaaaatataatgatggtgaatcctgccatcaaaattactgttacaggtggaggatctggtgtaggcgtaaagaagtta

SEQ ID NO: 7782 - DNA, 200 bp, Lawsonia intracellularis
gcagaaggacttattagcataggtaatacaggtcgccctttgaaagagtttgaagttgaacaatatggacttgtaagttttccttttgcaattgatggagttactattattgtaaatccttcaaatccgataacacaattaactaaactgcaacttaagaaaattttttctggaaagataagaaactggaaagaagttgg

SEQ ID NO: 7783 - DNA, 200 bp, Lawsonia intracellularis
agggaataatgctcctatttccctttatataagagaggacggaagtggaacacgagaggtttttgaagataaagtaatgcataaaactcatccttataaaaaagctaatgtatttaattcaacaggatctataaagacagctatcagccaagataagaatgctattggttatattgggattggatatttggacagttctg

SEQ ID NO: 7784 - DNA, 200 bp, Lawsonia intracellularis
taaaaggattagttgttgataatatgatccctacacaagaaaatacatttaatggttcttatactataagtcgtttactttacatgaatacaaagggagagcctaaaggtattacaaagttatttatagattatatttattcccctgatgggagagatatcattaccaaagcaggatacattcctattgaaagagaatag

SEQ ID NO: 7785 - DNA, 200 bp, Lawsonia intracellularis
cgtgtgagtagttattttatagccaaaactagttacctgtgtgtttttatctatgagttggctcaaagttagtatatattttgctgtaagtatagttttaacaggtattttagtacttataacaatgcttattgctcttgctttacctataataagtaatactaacttggaaaagattatttcattaacttggcagccta

SEQ ID NO: 7786 - DNA, 200 bp, Lawsonia intracellularis
atgaaggctattttgggatccttcctatgttgggaggttctttttttttagctatttttgccctgtctctagcatggccattagctctgggcttgaatatttggatgttgaaggtagataaaaggtttttagctagagtggttgcttattttataaagcttatgatagctattcctacagttgtttatggttttgtagct

SEQ ID NO: 7787 - DNA, 200 bp, Lawsonia intracellularis
gtttttttactagttcctttagttcgtgaaggagctggaggtacaggtttttgtttattttctgcaggtgttattcttgcattattaatccttccaactataaccttagtctttgaatcaggattagctacttctttagaaaagctacgtcttgaaggcattgcattaggtttttcaagattagagcttttttatttttt

SEQ ID NO: 7788 - DNA, 200 bp, Lawsonia intracellularis
tgtattaccaaaatcaaaaaaaatttttgttgtagcagcaataattggctttggacgagcaataggagatacactaatatctcttatgttatcaggaaattcaccacaattacctcagaatatttttgagagtatacgaacgcttacagcacatattgcactcacaagtgctaatgaaatgtctggtatggcatatgatt

SEQ ID NO: 7789 - DNA, 200 bp, Lawsonia intracellularis
cactttttttatcagggattcttttacttatcattaatgctacagtaagtatattagtacgccatataataaaactatcatgaaccaagtatttttatttttattttctttactagcatccttttcagtagtcattattatggtagtcatttgtttttttatagcttttcttatttggaatgggttacctacattaaata

SEQ ID NO: 7790 - DNA, 200 bp, Lawsonia intracellularis
tagcaatattttttgggaatgttccacctttaagggctttattaggtctagagcctgtatgggacgggatatggccagcagttctaggaacattagagctaattgggattacactatctttagctatcattcctggtataggatgtggaatttttttatcagagtatgcgtcagcatctcaatcttattatataagatgg

SEQ ID NO: 7791 - DNA, 200 bp, Lawsonia intracellularis
ctagttgatatcctttcaggtattccatcaattgtgatgggattatttggttttttacttattatatttttacgtcatacaatatggccagaagctaatacttgtttattattagcaggaggctgtttagctttacttgtcctacctacaattattgttacttctcaagaggctttttctgcagtctcaaatgaactgta

SEQ ID NO: 7792 - DNA, 200 bp, Lawsonia intracellularis
tttaagcgctacagcattagggtttactaaagaacaatttatttggtttataaaattacctgctgctagtcgaggtttgtggggaggggttttattagctattagtcgttctgctgaagatacagcagttattttacttacaggtgtagttgctaatgcaggacttccttcaggactaggttcaaaatttgaagcattac

SEQ ID NO: 7793 - DNA, 200 bp, Lawsonia intracellularis
cttttattatttactatactgctacacaataccaaacacaacaggagcttagtcaagggtttggagctattattgtgcttctttttttaatagttagtttattttgtattgctaggcttattggttctaaaatttatagatttagttatagagaggggaaatgtctatagctgtacatgtagttgatctaacagtttctt

SEQ ID NO: 7794 - DNA, 200 bp, Lawsonia intracellularis
ttcatcaacaagaagttctcagtcatataactatggatattccaagtcatggaatttttgttataactggtcgttctggatcaggtaagacaactttattacgtagtataaatcggctaaatgaagaatttgatggttgtgttactaaggggtacattgaagcagatttaggttatgggttaaaatctgtttttccatct

SEQ ID NO: 7795 - DNA, 200 bp, Lawsonia intracellularis
attcagaagaactttacattatcaaagttacgtcagaaaattgggatggtatttcaaactccaaatgttttccccactagtgtatatcgaaatatttctattcctcttgaacaattaacacactatgctaaaaaagatattcctacatatgtttattctgcactagatagggttggtttattacaagaagttgaaaatcg

SEQ ID NO: 7796 - DNA, 200 bp, Lawsonia intracellularis
tttagatattcctgcacactatctttctggtggtcagcaacaaagactttgttttgcaaggatgttagctttagagcctgctatacttctactagatgaacctacatcatctttagatattcatgcaacacagaaaattgagtctttactattagagttagctagtgaataccctattattatggtttcacataatatca

SEQ ID NO: 7797 - DNA, 200 bp, Lawsonia intracellularis
cacaaatttgtagattagctcacgaaattgttattcttgagtatggaacaattattaataaattaacagaaaaagcctactataaagaaatattaactagtattattgaacataatattaatatcattaattaacttatgatgaagttatagttctttatagtatgctttacttacggttagtactaactataagtaacg

SEQ ID NO: 7798 - DNA, 200 bp, Lawsonia intracellularis
ctaaaaattaaggtggcttataagccatttatttttattatacacgtagtccatctttataatttacatcttcagcgttgtctctattgcctgaaccaagaacaatatcttggcattcttcacgccaaaactttagacgatcaagaaaacgttctaaagtggtttgaaagtcagagaaagagtttttttcaacagctaga

SEQ ID NO: 7799 - DNA, 200 bp, Lawsonia intracellularis
gcaatatgcataacaatggactcttggtttatgtcatagcctagggtagaaccaagtgtttctcctccaaaaagattgcctgttagaagtcgtgtaaagagtttttcacgtcttcctggaggaggtacaggtgaaacttgagcataaatgtataacatacttccatctggtaaagcttcaaagtctacaggcatgtcgtc

SEQ ID NO: 7800 - DNA, 200 bp, Lawsonia intracellularis
aaattctacacgacagacattattttcatcaagagcaagatcaggaagattgataatgggccctagttctttaataaggctttgagcatccataaaaagctccttggaatagatgtatatgttatagtgtaggtagtaaaaattaactatgagaagaaaactttattataaatgtatcttattattctctattgatgtta

SEQ ID NO: 7801 - DNA, 200 bp, Lawsonia intracellularis
tatcgattagtgatattgtcaagtgtctatttatagtattttatatggtagggtatgtattttagagtagaatattaaatttattctaatccataaccttttccaccaatgaagctcaatatcataattagtgtttttgaaagaaagtttgattgtgccattaaacgagttactgctgcttcattagagttagcttggga

SEQ ID NO: 7802 - DNA, 200 bp, Lawsonia intracellularis
taatttttttgctaggtttaggccatccttatctatttctttagcaagaacagataattgttctcgtacggttgtatcttgtaattgaggatgattaagttttgttagtaaatatacaacagacaaaattagattttgtttgttagaagggtatatatcccactcattattaaatacagtgcgtgcttggtcacagagaa

SEQ ID NO: 7803 - DNA, 200 bp, Lawsonia intracellularis
gtctagaaagctgaatagctgtacgtttcttttctttaatatcttctggtgattgtgttattttttctattaatggagatatgttactattagaaactatatgcattgatttttcaagaagtatcattgtaatgtggctatcttttgtagcagcatttgtaaggatcccagcttggattatagtactataaaacgaatct

SEQ ID NO: 7804 - DNA, 200 bp, Lawsonia intracellularis
gataattgtgaaagaattttttcataaacacaagcagggatttcagtaggtgttccgtttttttgattagcagttttttctatattatctgctgcagtataaagtttagttaaaatagtttggcgtgggagagccattacttcttggggtgttgcattaagtgcatttaagactgctttaaggccagtttcaatacactt

SEQ ID NO: 7805 - DNA, 200 bp, Lawsonia intracellularis
atctataactttttcttgaataataatattttttgttgaaataattatatgacggttaagttcttctatactttcttttagcatcgaaggtggaccagttagaacaccttctatttctgaattaaattttgttaaaagaaattgtacgataggtccaaggttgacatctgaagtcgttgaaatttgagatgtaactttat

SEQ ID NO: 7806 - DNA, 200 bp, Lawsonia intracellularis
ttattatatgttcttttaatacagtatcatttagtttagcacttaaaagttctttgaacattttttctgataacttaggataatttgttatatcatttctaagttgttgtagtgcactatcaataaagtttttaggatttgggacatctatcccttcaaaaaattgggaggtactcattataacattttctttaacccta

SEQ ID NO: 7807 - DNA, 200 bp, Lawsonia intracellularis
ggaaacatagggagtttgtttgggtctaaatggctatctattatttgtagattgtgttgtgctatttgtgcttgacgtacttgaggagtgttattatttggggtatgtcttgttctatacgcccttaatgcaagtcttgctaattcagtcatccctaggctaattagggctaggaatatacgacgtcctctattcctatt

SEQ ID NO: 7808 - DNA, 200 bp, Lawsonia intracellularis
tgtattttctcgaggcctgttatgtggagcaatcggcatagggttagaaatatagatgtcactactgtagtgtgaagtagagtttaccatgatttcctcacagatagattaaacattaaagcatcataatatatatatatatgatgcgtccttataattactaactagagattagaatggtaagcgtaatatatactaca

SEQ ID NO: 7809 - DNA, 200 bp, Lawsonia intracellularis
taattactgttgtttattaattaatatctttataattattttttataatttcaatacaacagattgtaatatcaataatgtatactattctctataaactaattttttcttaaaatcattagatataatttttatatataatttaaatattactatacattgatatagtagttatatttacttttttattaaataaagca

SEQ ID NO: 7810 - DNA, 200 bp, Lawsonia intracellularis
atcataaaatgaagtatcagatagtaagctttactaaagatatgtttctctaaatagtatttttctttaagaatagatttactaaggttagagaactagatatatcatcagcattagaagaggtttctccttcttcattatttctctgctgaatttcttctaactgttctttgacttcttctataagaagttggttttct

SEQ ID NO: 7811 - DNA, 200 bp, Lawsonia intracellularis
tttaagaagggtcctaatatcttatgcttacgggttagtaatgcacataatacacggagatatagctctttttgatgttgtgataagtcactccaatcatcttcccctagagctgtaataaggcataattcaagttcatgatagagagtagggagttgttttcttagttcttcaggagttattagtggattacatataac

SEQ ID NO: 7812 - DNA, 200 bp, Lawsonia intracellularis
tactattgtgccagattcttttaatgcttcatatgcttttaaaccagaggttattattttaaaacatttttgtttatcttttactagcttacttaaatgcataccaacatctttaatacactgaaagtaagaatctgcagagctagaaagtctttctttatacttttcttcaggaacagctttaatagggcccttattgt

SEQ ID NO: 7813 - DNA, 200 bp, Lawsonia intracellularis
ttttttgtgcttcttgttcagtttcttctgcttccttttttaacacattccctacagtctcacgtaaggttggattagtttgataactattaagattaaatgcccaagcaagacctttagcaactgtgtctattactgtagctattatactgtcttctttttctatatttaagcatgtggtatatacataatctgctagc

SEQ ID NO: 7814 - DNA, 200 bp, Lawsonia intracellularis
tcattgcatctttcttttaatagcgttggcggaacttctcctaaggcagtgataagtttttgccgacgttttatggcacgttctaatattgactgttcaacttgtcgtccatctttatcataagcttcttttactttagcctcaatacatctttggagagcagtaagttttaaagaatcacataataatttacaataatg

SEQ ID NO: 7815 - DNA, 200 bp, Lawsonia intracellularis
ttcagaatcaagacgatcttctagttttattatctccttttttaaatatagtaatgtttcgtccagagtagactgtggatcttctatttctatccctgactcttttaattcttgagtagttttgtttaaaactttgattgcagttccagggaatttagagtcttttgtatgatctagatcagattctataacttctttat

SEQ ID NO: 7816 - DNA, 200 bp, Lawsonia intracellularis
taaagtattgaactctatgtttttctacttttgctgtagaatttccatatgtggcttgatatgctgtgatagcatatcttactatttcagatacacctagtgttgcaaatcccaaagcaacacgacaacctattttgaaataacttgctgttggaacagtagtaggttggtctggtcgattttgagctcttgatgaaccc

SEQ ID NO: 7817 - DNA, 200 bp, Lawsonia intracellularis
aaaaaatcaaaaataccctgtattgttgagctaataggcatagtgttatccttatttaagtagtagtcatcattatttttaataagttataataagatggtattatacttatctatataatataaatagatactgaaagggaaagggtataaaaatataaagtaagattgaataaagatagaaatagtactagttaagaa

SEQ ID NO: 7818 - DNA, 200 bp, Lawsonia intracellularis
tgataatataatgtaaagttactatataactatatcataataattaatagttgattgtcaattgaagtatttttcacatttatttaacatagtaatatattataatttattatatataataggttaagtatatagatttttgtaattttacttgtagtatattagttagttaagttatataatagtaattgtataattag

SEQ ID NO: 7819 - DNA, 200 bp, Lawsonia intracellularis
tttttactaaaaaagtatgatttgccaactttttaggcagagctgagtatatttatggcaattaatttatgggctgctaatatacctatatataaaaagtaataaaatataaatggttatgttaaattataatatataagcctactataatttttattacaataacatattatgcatataatgagccaagtagtttggta

SEQ ID NO: 7820 - DNA, 200 bp, Lawsonia intracellularis
accaaggaatattgtatgttctataggttaagaatagataggtgtaactgataggataaagctatagataagtattttgtgtcttttaagtatgttgtgtttctaaagtatcaaaaaatggttctgctgtttgagtaaagatatatctataagcaccaattggtattacaggcatttctccaccatttcttgaagtctct

SEQ ID NO: 7821 - DNA, 200 bp, Lawsonia intracellularis
cttgcttcatattgttcagctttttcatcaatggctagtagtaattttcgtagctcggtatcttgcatcgcctcctgactgttaatgtcaataccttttacttcaaggtagagttgtttaatctcacgtttggctttcccgtagttttgtaaagattctgctaagttagccacttttataacaatacttgttagttcctg

SEQ ID NO: 7822 - DNA, 200 bp, Lawsonia intracellularis
tgatagacgttcattcgaatagtaacataatccttctatagtttttgctttcctttgtaatagaactgcaagtgaaccttggtcatactttactcctctggtgtcaagctctgtttgtaattcttttattacttgttccttaataagaatattttttatttctttgctaataattgtagaaagttcttcttctgttagtt

SEQ ID NO: 7823 - DNA, 200 bp, Lawsonia intracellularis
tatgttgtttattaggagtaagccaaagctgttgatatgcacgttttataataggttgagcatcaggattttttctaatactgctttgctcaagttctttttcaacttttttaatggcattttttaagacatcagaggtggaagtatttggagtatcttcaaatacagtttttaataatcttgcattataccgttctgtt

SEQ ID NO: 7824 - DNA, 200 bp, Lawsonia intracellularis
ttgtttttaaatagactaggatcaaattcggtacttaaacgaggttcttgacttataattcttttggcttggtaggactgtactgctctaacaacttcagttattccaaatgatagaaatgctaaagcaatacgtggaattccttttgtacgtaaaacatatttagattgagatgatttttgctgttcgattttagcttc

SEQ ID NO: 7825 - DNA, 200 bp, Lawsonia intracellularis
ttcagtagactgtgattctgttaatgattgagtcgttaggatatttatacttcctattggtatagggttaatttccatagtatttttacctttcttattttttatagaacagtctacttatagggtataactcataactatcttccaatttattagcctttatcttttatatttagttagttctttttgagagctagcta

SEQ ID NO: 7826 - DNA, 200 bp, Lawsonia intracellularis
ctattctttgttatagatccagtttttaggtagaagtaaataaaaattaaagaattgtagcattaatacctatattatttaaatatggtgctgcaactccttgaaagatttctctatagtcttgtaggcttatttctggtaattggccaccattctttgttgtgtatgtctcttcaagttcaagtgcagcctggtcaagc

SEQ ID NO: 7827 - DNA, 200 bp, Lawsonia intracellularis
tttagctttagctctttaagttcaggaagctgacttgcttcttgtttagtcatatctttattaaccattattgcttcaatgtatgtgttttgtatttcattttttgcttgagtataatttcgttgtgttacagcattatcactcatagaggtgacaagattttctatagttttttgtaaattttcgtttggagtacgagc

SEQ ID NO: 7828 - DNA, 200 bp, Lawsonia intracellularis
taatgcacccatctcatattgttttgtcatgagtagtgtagccattgcaccttcatcatttggtactcctcttgttcctagttcattttttagattttgtactacaacgtcttttagtaaaatatttttcatttctgtagtaagcagtgaagtcattatatcatcagtaagtttagtttctagttttgttatactcatag

SEQ ID NO: 7829 - DNA, 200 bp, Lawsonia intracellularis
aaaggttgttcaaagcagtagatgtaatagatccaacttctttatgagagataccagcaagatccttaattgtttgcttagtagcattatctatagcattaggaaagggttgtggttgatttggatcaagcatctgacttattaaatctctattttgaagccgtatttcattttgttgtacacttgttgactgtgtagtt

SEQ ID NO: 7830 - DNA, 200 bp, Lawsonia intracellularis
gttagaattgctgttttatattcttgaagtgtacttgacacaaagttaacagcagaattaagagcagccataatacgaggaatagcccctttacctactcgaggttgtccatcttgtgtgttagccttctgcttgttttcagtagcttgtacattttcaagattctgagaagaatctgaaacatttctaagttgtacttg

SEQ ID NO: 7831 - DNA, 200 bp, Lawsonia intracellularis
catttttttccctttaagaataaaaaaagcaacaggttacaattagctacttaatcttatattatgtcttcagattgataactatctattctataactatatgcatagtacttgaaatgcatatggtatgtagtgataatcaactatcatttattttgatacaactactaacgtacccctagctctattaaaaattgttg

SEQ ID NO: 7832 - DNA, 200 bp, Lawsonia intracellularis
tgttgttctatgtagtgcttcttcataagaagattgagatataagaggcataagtcctccattgcgggctgttagttgacgttcgtgcgtacctgctgattcatcaagtagtaattttagcttcttatattctgggttccctgtaacttgtgcatttgttagttggaatctatccataacagcttgtacataagcactaa

SEQ ID NO: 7833 - DNA, 200 bp, Lawsonia intracellularis
gagcacttttcctagcttcagaagaattatgtaaattttctcctctagtaaccatttcactgacaattttttctagttctctattaatttgatctggtggataattagttagtcctcttatgtccttactacgttcagacaaaagtcctgctctatcggcaccatatccccatggtccacgtttgcctagagcatgtctt

SEQ ID NO: 7834 - DNA, 200 bp, Lawsonia intracellularis
aattgtttattagcttcttctaatatcatttcttgttttaattcttttgaaagtaaatgactaaggcttttgtctgtgattggttcatcaaaagcactaggtttactttggagacttaatatagagcgtccaagaagatgtcgtgggtctgtactagctataccttgaagatcagtttttgctttttccatagcactttc

SEQ ID NO: 7835 - DNA, 200 bp, Lawsonia intracellularis
aacggcttcttgatgtgggaattggaattgtcctgttgcaacattatcatggagttgttgaagaagctgacgattttcacgttgaatttgttgattagcaagtgctctaggtgcagcaccagcactttcacgtgtgttgtagccatggagagctcttgctaattcgcttaaacctagcgtacctaatccccatcctacac

SEQ ID NO: 7836 - DNA, 200 bp, Lawsonia intracellularis
gagccaaccctgtggcagtaagaattctttgtcctaatgatctaggtggttcagcttgatgttgatgatctatttgtgcaagtactttggtacgttgctctctatcatcaacaggggtttgatttgtaggaccagtgaaacgtacaggaagcattggcataagcatatccccttatatttttaggttatatgtgcacaac

SEQ ID NO: 7837 - DNA, 200 bp, Lawsonia intracellularis
gttatatagagctcattcaaatattattctataaaaatatttaatcctttctttatcaatagattaagaactattgttatactcaattatatctttctatttttttgatacctatatttaggttgttgttgttgttgaatctattctcttgtataatattacgttatttacataaaacctatagcaatcctatagtatat

SEQ ID NO: 7838 - DNA, 200 bp, Lawsonia intracellularis
gttagctacctattaaatcataaatatctaaagcgtgttgagggaaatatgtaatagtatagtattaataaagattaattattataattaattatatgattatatttagtttcaatatatttaattaatttgtaaactaactgttttatttcttttgacatagtatagtcagggttgagagctaatgaaacaatttttgt

SEQ ID NO: 7839 - DNA, 200 bp, Lawsonia intracellularis
atgttctgtatgaagcaagtaagatttatctatttcgtctatatagatatttttattttttaactcattatgcaagtcagataaaattttttctttaatgataattagttttagttcttgaataagtttttttataatattttcttttgtaaggttagtttttgtttgaggtatttctagaccatatttagcaagaggta

SEQ ID NO: 7840 - DNA, 200 bp, Lawsonia intracellularis
agggagcagtatttgtagtagcagtaaaactattttgtatattctccattgttctttttatgttattagggagtagtgttttttcttcagagagaggttgtaatatatgatagccgtagtcagaatattcatctttttccatagaaaaaaaagatgattttgatttactattaaatatactacaagtaactttaataagt

SEQ ID NO: 7841 - DNA, 200 bp, Lawsonia intracellularis
tcatatatacctaatgttattaagcttaagcaaatacgatgtaagtattttgaagagttagagggtgtagttaaagtctgttgtcgagtagtaataaatggaggcttatctatatcactaataataggactgccgataaaaacagttgggagtgttaacatataaatatattccttatttatagttacttttgtgctata

SEQ ID NO: 7842 - DNA, 200 bp, Lawsonia intracellularis
tttatgtattactacgtaaaaattttatatataaactataacataactatattttgtcaacaaatatatattattataatatagttaataatatttatataaaaataaaatattaaatttaataaaaattatgtaatatattatatattatatttgtaataattcataacatatataattatataatagttaatatgtat

SEQ ID NO: 7843 - DNA, 200 bp, Lawsonia intracellularis
attaaattcataacatagaaataataaaacaaaaaacagttgcattgatataatatatcagatcaactgttttctgttcttttaagaagctttttagcttcatagttaaagagaaaataataattttctaatagatattgaataattacttattgatatttatgggttatttactaatgtctttataagattacgttttt

SEQ ID NO: 7844 - DNA, 200 bp, Lawsonia intracellularis
taagctagtaaaaatgtaacaatcaattttgacgctattttttattttactttaatttgtttatgttacttgttgttctaattctgaaaggagtttttttactaactcttcatatcttgattgtatggaatcagtccttcttgaagtagctcctacaagagtagcagctctctctgcatcaattttttctcgagcttttt

SEQ ID NO: 7845 - DNA, 200 bp, Lawsonia intracellularis
tttctgactgtttgagatactcaatacgttcttgacgagtttttggtctgtattgttgttgagctgaagagatttgggtatgattctgattttcaaaatcttgtatttgctctttgcatagttcttctgctagcttttcaaagaggatagctggtataacaggtacattattttctgtgtgttttgttttaatagtagat

SEQ ID NO: 7846 - DNA, 200 bp, Lawsonia intracellularis
tctaatactattgtagctaatttataattttcacataattttttgtagttacaatgggttgatacaagaaatgaacgtattcctgttttattagcaatcaaatttttgagcttaatagaagcattttgtattgctttgtccgaattatgtttattttctattgtattagctagttttgatacagcttgctctacttttaa

SEQ ID NO: 7847 - DNA, 200 bp, Lawsonia intracellularis
tttagtttcattttctgatatacagccagatatgtctaattcaggcttttctcctgttaatatcaagagggatgtacttgatactggtatgcctctgttgtcacattctatctttacctcctctataagtactttttggagaaggagttcttttaatttttgtataaatattgttgtaaaaacttcttcatctaagcatg

SEQ ID NO: 7848 - DNA, 200 bp, Lawsonia intracellularis
ttggtaattgaagcacttcaggcttcaatgctttcaaagctttttctaaaatatcttcaggtgaatcttcagaataagaaccaagttcttcttcaactttttgtacagcattttcaatagcattagggtaaggaaattctttatttggattacacatatcttctaatagctttttgttatactgtcgtgcttgggtttgg

SEQ ID NO: 7849 - DNA, 200 bp, Lawsonia intracellularis
tttactctaggttgttgattttggtttctttgtgcacaataactttgtattgcaaagactgcctcagatacccctaaagttactattgctaataagactcgagaaataccttgtggccatcttctttgattttgttgtgtagatgacagattcctatcagtggctactgtagggccttgtgtatatggagaatgttctat

SEQ ID NO: 7850 - DNA, 200 bp, Lawsonia intracellularis
aatcatatatcagtccctcataaattttaattaagttataatgaagttctattattaatactaaggactttatttttagtacttatatgaatattatataattatggtaatgatagtcactaacaaaatgtatgtactaagtaggtacatgtattataattttgtactactataaaataagttgttgttaagtatcttgt

SEQ ID NO: 7851 - DNA, 200 bp, Lawsonia intracellularis
aaaatagttagttatatattattagtatagtatgaatttatttttattaaatactagtactcactatactactattactattattatggctagatgagttatacgtttgtagttgacgttgaagcatagtgatttctgaagacaataatttttggtagtcctcaacagactttcgtggagtgttatttctatgctctctt

SEQ ID NO: 7852 - DNA, 200 bp, Lawsonia intracellularis
cttattttgtggtcatccatatctaatgtaattctacagttattagcagtatctttatatagtttagattgtcttacatcttcttcagtatactgacctgaggtgataagaagagtacagattttttcttttattctatttaaaacataagttgaatttaacatgttttgtaattgattcccaagattttcagtgacttg

SEQ ID NO: 7853 - DNA, 200 bp, Lawsonia intracellularis
aacaactgaatctcctagtttcattttttctgatcttttatttggagaaggaagagcagctagtttatatagagtttgttttcctcttgattctataatatattttataagctgttcatctactgattctaagcatccagtcactggatttatagagcttagtttagattgtattaaagatgaaactatctcttcaagac

SEQ ID NO: 7854 - DNA, 200 bp, Lawsonia intracellularis
agtgatactttatctcttgactaagatacataaccattaactcataggttaacttttctttcatttgaggagtattcattttgagtgtttttagactatgtgataagtgtttttgaacatcaggtttaaatccatattttcgtaaatcactacaagccaaagccaaagcctcatgcatagctccaggaaatgtagactct

SEQ ID NO: 7855 - DNA, 200 bp, Lawsonia intracellularis
tgatatggattagtcatggagtcaacaacattatagttatagagccgtattatattcctctgaacatctggggatgataactgcttggctgtacgaaagttttgtacagcagttacaagttcagaaatacctagtgtggctattcctaatagaattcgagggataccacatggccgattagttgtatttttttgtgtggg

SEQ ID NO: 7856 - DNA, 200 bp, Lawsonia intracellularis
gatacgtgaacttctttctattccactgactataggaccaccaaatatagtaggaaaggcaggcatgatagattccttttaaagaagcatggacgacggaaaaccatacctaattttagatggtaaaaacagaaaagattgcctataatgcatataatttatagcaagttagtgttgataataggataacctctagttgg

SEQ ID NO: 7857 - DNA, 200 bp, Lawsonia intracellularis
acaattaagtttagttttgtttatgagctacatcaaagatgataaaaatgattgattgaatttaagaaaggcgtcttgatacatatcaacagtcactacaggatattcaccaggatgttctgcttgtttagcatcttggagctctgtacaacactttactagtttagttgaaagttctttatatttactatgctctttgg

SEQ ID NO: 7858 - DNA, 200 bp, Lawsonia intracellularis
cttcttgttcagatatactgtattgagttataagatctagttttaagtcttctaatacttttttacgagcttgtttagcattatcattgcttagtattattgctgttgactttaagataagtttattcattgcttctgaaattttttcttttggcattgtagaaatttgttttaacgtagatgtttctactgtgcacatc

SEQ ID NO: 7859 - DNA, 200 bp, Lawsonia intracellularis
tgtgatatacactctgttggaggttcagaaataccttcttgttgtaatctttctattaaagtttttgagaataagtttttgacaagattgaattttatttcttttgtaagttctaattcaaatgattgacttgtaaatggctcaggaaattcatgaagtctcatttgaagtccacttaggctttgttttaatatattttc

SEQ ID NO: 7860 - DNA, 200 bp, Lawsonia intracellularis
atctacagaagtaattataggtttaagacagtcttgagcatctaatatagcattttgtatagcttctggaaaaggtgatgttttagactcaagtgaactacatattattttataattttggtgtctaacaccattaagtggtgttctcatagcttgaggtggttgagcttgagcttttcttgtataataagaatgaatag

SEQ ID NO: 7861 - DNA, 200 bp, Lawsonia intracellularis
ctagtacaagttcagaaatacctagtgtaactatccctaataggattcgagggataccatgtgagcgatttttactttgttgtgtgggagttttcgaatttttgtctgttccactgactatagcaccattagatatagtagagacggctgacatgatatattcctttttagaggatggttgtcaaaaaacatacctaatt

SEQ ID NO: 7862 - DNA, 200 bp, Lawsonia intracellularis
ttagatattagaaaaaaggagtgaccttatttatgtaatataaggaataattaagcttaagatatatgattagaagttaactagtgtatataatttgtagcaagatacttatacaatatatctaacttttattttgtcaatgtatatacatatacttttaatacagagaagttagaaggtaaatataatgaaagaataat

SEQ ID NO: 7863 - DNA, 200 bp, Lawsonia intracellularis
gagttcttctaagcattttttatacttcctttatttattactttataatcaagctgaaaattataaaattatactaattgttatattaggttatatagtatattattactttcataattaattatagatgctattaatgctattaatttatttagccatctactcatataactatgatatcatagtaagttaagaagagt

SEQ ID NO: 7864 - DNA, 200 bp, Lawsonia intracellularis
tagaattttgtttctgtaacaccaaatattgctaaaaatggagcagtaacttcaataaatgcttcttggtatgtacgtaaaggtactacaggatattcaggatgttttgctttttcagcatcttggagttctgtactacactccatcaatctagtttcaagcattttatagccgttatcttttttagcttcttgctcaga

SEQ ID NO: 7865 - DNA, 200 bp, Lawsonia intracellularis
tatattatatctagatgtaataacatgctgatagatagataatgactcttcgcgagcttgtttagaattatgagcgttatgtattgttgctgctgactttaagataagcttattcattgcctctggtatttcttctttcggcatattagaaatgttggtgagtactggtgtttctattgttctgagttgcgaaataaatt

SEQ ID NO: 7866 - DNA, 200 bp, Lawsonia intracellularis
ctggttgaggtggaacttttctttgttgtaattcttgtattaaactgtctgagaatgaatttttgagaatagtaagttttatttcttttgtaagctctagttcaaatgattgacttgtaaatggttcaggaatttcatgaagtctcatttgaagagtagttaagcttcgtgtaagaatgtcttcatgtccgggagtaact

SEQ ID NO: 7867 - DNA, 200 bp, Lawsonia intracellularis
ataggtttaagatattcttgtgcacttaccatagcattttggatagcttctggaaaaggggagtcttgtttagggtctattgtgctatgtattactccataattgtggcgtctagcagcttcatttagtggagttccttcacgagcacgtaatctagggctttctttctctgcaacttgagctccttgatgttcagagct

SEQ ID NO: 7868 - DNA, 200 bp, Lawsonia intracellularis
ttttgtacaataagagctaatagctcttacagcttcagaaatacctaatgttaatgcagcaagaataatacgtctagtaccacttgaattcatttttgtttgtccaaattgacttgagctatcagtattagtttctttgaaatgtgtttctacaatgtgttgagtactactactgttactaatacgtgatgtaactcctc

SEQ ID NO: 7869 - DNA, 200 bp, Lawsonia intracellularis
gcatataacctcccatgatgattcacttgttagattatacattattagctgttatattatagctatattatcaatatggtatattaatatattaagtttaattttattatattttatataaaaatataataagctattacatatatatatattaatattattttaactagttaaaataatattaatcatagtataatata

SEQ ID NO: 7870 - DNA, 200 bp, Lawsonia intracellularis
gtaacattatttttttatttttagttaatatatattataatattcataacctataactataaaattagaataataaaaagtataatgaccatcttaatagtagatggtcattataaataaaaagaaaagaaagatataaaattgcagttaaaattaaataaaaattgttatttgactaagtactctgtattcacaacaga

SEQ ID NO: 7871 - DNA, 200 bp, Lawsonia intracellularis
ttgtggtttaccatccatccatgctttaagattttcagcaagaattcgtacaatatttctccgtgcttcaacagattcccatgcaatatggggagtaaagacagtattaggagcagataatagtgggttattaaggttaataggttcgtcaacaaaagcatcagatccaagacctccaagtttccctgaaataagagcat

SEQ ID NO: 7872 - DNA, 200 bp, Lawsonia intracellularis
ctgctacagcttgctcatcaagtaatgcgcctctagctacattaataataatagcaccgtctttcatagtttcaatacgttttttattgacaaggtgaaagttgtcttctgtgagtggacaatggaggctaagaacatcagcatttttgaaaacttcatcaagatcagcgaaagaaaaaggggtatatgaaggtggttgt

SEQ ID NO: 7873 - DNA, 200 bp, Lawsonia intracellularis
acaggtctttcatcataagcaagaacactcatgtcaaatccatgagcaatgtatccagctttttggccgatattaccatagcctataataccaaaacatttataggtaagttctacttgtggatatttccaaggagcccagtcagggcttgaccatgcaccatttctaattgcttgatcaagagctgctgtatgtcgaca

SEQ ID NO: 7874 - DNA, 200 bp, Lawsonia intracellularis
taactcaaggagtaatgcaaatgcatgttgtgcaactgcatcaacaccataagctgttacatttataacagggataccacgtttaccagcagtttcaatatcaatttgattataacctgttcctaatacaccaatacatttaagttttggtagctcttcaatgtgttcagttgttagtatatctctacctacaagtagta

SEQ ID NO: 7875 - DNA, 200 bp, Lawsonia intracellularis
tatctgcatctttagcacgttcaacggtttgttcaggttttgtaagatcataaacagtaagtttccctaaggcttccagaggagtccaagggttatccccaggattagtttctttaccacttaaaattgttatttgcataaggggcctccatgtatgaaataagttttatatgtttcccttaatggcaatcacataaagt

SEQ ID NO: 7876 - DNA, 200 bp, Lawsonia intracellularis
tagtaacctttataatccagttattcttttagaagttcataaggtaaatggctacgaatttcatcgccaacaaatgttcctagttgttcaagtaggattccctctgttataaccatatctgtaatacttggacctgtcataagtttttttgtaaaacgtcctgtgtgagaaattttatgtgtgcttgatgaaagtgtcca

SEQ ID NO: 7877 - DNA, 200 bp, Lawsonia intracellularis
aatagcatctagtatcacttcattattaggggcgccatcaaactgaaaaatgtttacagttaatatccaatctggctttatcattgagtttggaccaacagctaatccatttattggtgctaaaacattagagatagcttgttgtaatacacgattaataccttcagctagagactcactccatctatggagttcagcga

SEQ ID NO: 7878 - DNA, 200 bp, Lawsonia intracellularis
attggacaactgttgcttctccttctcgtataaaaatttgtggttgatcaagatagccagggatagttatagtgtctattgcaacaattggtcctgtgatatcatgtttagaagtaagaagttgagttaattttatagatggttggagaacataatatgtaggtattggacttctatataatagtccacatccagggagt

SEQ ID NO: 7879 - DNA, 200 bp, Lawsonia intracellularis
aatagtaagattataaggaggcattgaaataacatattcatttttgattaataccttttcctcttataaggacttcaggatttctttccagcatgtttgcaagaatacgtatagcttttgcagcttttgagacttcctgtaacatatgatggatgtctaaaagtgtagggctattattaccaagtaatcgttctgttgta

SEQ ID NO: 7880 - DNA, 200 bp, Lawsonia intracellularis
ttgttaattgtttgaaaagattttgttgcttcttttaaggtaagggagagttctgtattaagcccttcaaccattgtaccatattttttacttgcctttcgtatatcaataagagattgattaaattctgctacagctgctagcccctgatgtaaaaaattggatagttgtggaataatgttaggtgtctcaggtgtatt

SEQ ID NO: 7881 - DNA, 200 bp, Lawsonia intracellularis
aagaagtatcttgaggctatttgtgatttctaagatatttcctgaaattttgtctagaggcaaactagttaactctttaagaatgttgtctagctttgaaggtacagttgggataacaggtgtacctttataaaaaacaacatgtgttgtgtccatttgtgattctggtgtaataaaatttagttcaatcattagttgac

SEQ ID NO: 7882 - DNA, 200 bp, Lawsonia intracellularis
ctgtaagtaaactttgctgtgctaaacttgctcttaatccttgttttattaggttattaagatactctgtttcttcttcctcttcttgaggtaagttatgttttataaatattgtatgtgtattttcataaagttcaacatatacaggaattgtaaaacctatatcattggatattttgtcgactttaatgtcaataact

SEQ ID NO: 7883 - DNA, 200 bp, Lawsonia intracellularis
cgaccaacaggaacacccataaagacaacaggggaaccaggtgacaatccacttatagatttatcaaaaaacatgacaaatgtagctgtgctattaaaaagtttaactgagccaaaaaaaattatagctataataagaagtaaaatagagccagcaacaaatgctccaataagagttttactgacttgatgactcatagt

SEQ ID NO: 7884 - DNA, 200 bp, Lawsonia intracellularis
ggagatcctagagtatattgtgtaggttgcttccctcttgtgagaaatcggatgacttctggctgatgagtattttctttgagttgtttaggatctccttgagcaagtatagtgtgtgttgcagtgtctaagaaaatgctattagtaccaatagataaaatagtatctaaatcatgtgtaacaataatgacagtcatagt

SEQ ID NO: 7885 - DNA, 200 bp, Lawsonia intracellularis
gaggttacttgtaagttctacaattaactcatcaagcattcctgcactaataggatcaagacctgctgatggttcatcaaaaaaaacaatttttgggtctatagctagtgctcttgcaagtcctgcacgttttttcattccaccactgagttcagatggatagtagttttcaaacccagatagacctactaaagaaagtt

SEQ ID NO: 7886 - DNA, 200 bp, Lawsonia intracellularis
ttaaagatacttgttcctgaatttctgctatagacagtttggtataacgttctaatgggagagcaatattttctgcaagagtcatagatgtccacagggcaccactttgaaaaagaagtccaatattatgaagttgttcaagtcttttttcttctgttaatgcccaaaagtctacgttattatagtatacattacctact

SEQ ID NO: 7887 - DNA, 200 bp, Lawsonia intracellularis
gatggtctatgaagtcctactaaagcccgtaataaagagctttttccacaaccacttggtcccataataataaaaatatcttgtttgtttattgtgaaagtaagatttttttgaacaatatagtcatcatatgcaatagtaaggtttttgactgtaatgagtggttcatttgtagtattcatataaggctcatatattaa

SEQ ID NO: 7888 - DNA, 200 bp, Lawsonia intracellularis
atatattaaatataatggttaaacaagctgttgcaatgacaatacctacaattgaatatactactgctgaagttgttgctaaaccaactgcagatgcatttttcccactatttaatccttgatagcaacctgttatagcaataatgattccaaatgctataccatgtataataccaacccaaagattttttaatgcaaag

SEQ ID NO: 7889 - DNA, 200 bp, Lawsonia intracellularis
cctttttgggtaaagtttatatattctaatggctcaataccaagtactcctactccaacaataaaacctccaagcattcccataaaatctgaataaacaacaagcaaaggtgtcatagttgttagagcaataagtcgaggcataactagaaaatctgaggggcggataccaaacgtcatgagtgcatcaatttcttcatt

SEQ ID NO: 7890 - DNA, 200 bp, Lawsonia intracellularis
cacattcattgttccaatagtagctgcatatgacgcgccagtccttccagagaggataacacctgtcataacagcacccataatacgtgtcattcctattgccactaagctagatacataaatttctgcaccaaacattcgtaattgtatgactccaacaaatgcaaggataagtccaacaagaagactaataagtgaaa

SEQ ID NO: 7891 - DNA, 200 bp, Lawsonia intracellularis
caataggtaatgcttcaactcctgcttgttgcatacaacgccaaatatttgttgaactgcagtcagaatggcctgtaataagtcttttggtagaaagggtcatttctccaaggaaggttaaaattttttgaatggtactaggtagagatagggtgatatctccaatatattcaaggaatgagatttgagtagttttttta

SEQ ID NO: 7892 - DNA, 200 bp, Lawsonia intracellularis
tgtgcttctttattaggaggtgtttgaaaggcaagctgtataagattttttattcctgcaggaagttcatgatcattaatagttatctgttgtgattgagctttattaataagtgtttttataaatgcaataagactactgtcccatatgccaagactattagttttgagatatagttctttaactacaggatagttaag

SEQ ID NO: 7893 - DNA, 200 bp, Lawsonia intracellularis
ttgagaagcaaatcttgttgcatcaggaataggttggttaagttgccagttaccactaaagctgatttctaatgtctgcctaaataatgttatattagcagaggggggtaggtcatctttacctggtaaatgtgttgtattttgcaacatattcacactattttattagttaaatataatacaataaccatgttcttatc

SEQ ID NO: 7894 - DNA, 200 bp, Lawsonia intracellularis
catatctatatattatagttaaagtagttagactgtaatttattatagttttaacttttagttatctgtattcctcactgtaagaaaaaagttaatatttatttatttatttgtattactgttatttttgtttgaacttacagaaacttttgcaggtctaagtaaacgttcatataattggtatcctctttggtgaagag

SEQ ID NO: 7895 - DNA, 200 bp, Lawsonia intracellularis
tacttacatgtccttcagggatatcttcacgctcctcatgtgcaatagcctcatgaagttctggattaaatggctcatttatttcacccaatactgttacgccatattgtttgagtgtatcaaggaatagttttcgagtcatagaaacacccattaagatatctttacatgcatcgtcattacttccatattgtatagca

SEQ ID NO: 7896 - DNA, 200 bp, Lawsonia intracellularis
aggtcaagactatctaggacaggtaacatgtctgtaagaagattatctatagcataacgtatttgttcatcatgatctttttgaagacgttttttgaaattttccatttcagcaagcgcacgaagacgtatttcctgagcttcctcttcagtaatataattaggtccaatttcttttttatcttcttcttcaacaagcat

SEQ ID NO: 7897 - DNA, 200 bp, Lawsonia intracellularis
ttcagccgatgtatcttgatcagcttgatctgttatttcatgttttggttgaagaggggtatggtcagtcataactactccttaaagatttttccttagaaactttattgtttttatcttggtacaattaataaaaataaagttttcatggtgaacatagtaaagaagctagaaaggttctgcaaccctattaaagtcta

SEQ ID NO: 7898 - DNA, 200 bp, Lawsonia intracellularis
ttactatattttttattaataaaccttaataagttattaaggtttttgctctaaacttttttttatatagaccgattagtttgttagtatttttgcagttatcatatattactaatagtaaaattggaatatttttaagggatagttttttattgatagctactttttggataaaggtaatgatatagtttaaggaggaa

SEQ ID NO: 7899 - DNA, 200 bp, Lawsonia intracellularis
tatgtggagggagtaagttttgctacgtatggacttaaaaatgcgttaagcattcagtcaaatgctgttaatcaattgatggctggtgctgctagcgtgcagtctatagctccaagtggagataataatctattacgtatagaagtcatgaaacaaaatggaataggtcaacatcttaatattataacataattttttga

SEQ ID NO: 7900 - DNA, 200 bp, Lawsonia intracellularis
ttaaagtacaacatttataatataaaataagccaaacagtagtaagatatgcttggcttattttattattattattattatagctatattgtctaaagtttttcatttagatagagtgtaaggaagagtaaataaattttaaagcattatattttgattagtaaggaatctaaaaaggaaaagtagtatgatgaactcaa

SEQ ID NO: 7901 - DNA, 200 bp, Lawsonia intracellularis
ggatcattcaatgggtagtattgtcagtttgtatgacacaattattggcatgtggttctctttttagaggctttactggtgaaacgttggtatcagatgctcaaccttctttatctgtaactgtaaaaatgcctatgttgactgcagggcaaattacaccatatttatatacagattatggttatcagtttcctgtgaca

SEQ ID NO: 7902 - DNA, 200 bp, Lawsonia intracellularis
tttatcgctgtttatggtgtaaatgaaaacagccctatggctatttctacattaagctttactcccaataactggcaatgggatcccctatcctttaatatggtagatagtccagtaacttcttatgaatcctttgatggacataattttgaaggctctacacatattattaatggagcaaaggatccatttactattct

SEQ ID NO: 7903 - DNA, 200 bp, Lawsonia intracellularis
tgttgccccacaggaacgtttagcttcaatttattggcttgtacagcgttatgcttatagagctttttttaataaagcaaaaattattcttgaatatagagaaccattaccaagcaatttgtcagaaactacaaagctttctgtaacaaatcctgagatacaagcatttcaacagcgtgctattaccgcatttattgtat

SEQ ID NO: 7904 - DNA, 200 bp, Lawsonia intracellularis
cttttaactataaaggagtagaaaaacctacggcaccttacttgaagggtattaattcaagaatggttggtaactatcttggaagcatgagttttattgaaccaagaatgattgaacactagttttactaactagttataaaaacaaaatagattatatttgttaatataacttaactatataaataagtaaaaatggat

SEQ ID NO: 7905 - DNA, 200 bp, Lawsonia intracellularis
agagattactagtattaatcagattgaggatattgctttctccaactatcttcagtaattgactcatctacaagcataacaggaatgttttcatgaacaggatatacaactttacatgtagaacaaagaaggccttgttcatcacttataggtgtaactgaaccatgacactctggacaagcaagaatagttagtaattc

SEQ ID NO: 7906 - DNA, 200 bp, Lawsonia intracellularis
agggtttaaattcaaagatacctccaatatctattttaagatataataattatattaaaaaacaatatgttatatagtaaagtctttcaaattataattttctagttaacaaaagagactatggaatgcaaccttactttgttgatttacatacacatacaatagcttctgatggaacagatacacctagagagttagtc

SEQ ID NO: 7907 - DNA, 200 bp, Lawsonia intracellularis
ataaaagctgcaaagttaaagcttgctgcaatagctattacagatcatgatactattgcaggtttagaagaagctgaacaagcagggagagaaaatcaaattgaagttattcgtggatgtgagctaggtgttacaagtaaatatggagagattcatttacttggattatggttaccttatgataatatcagtcttaaaga

SEQ ID NO: 7908 - DNA, 200 bp, Lawsonia intracellularis
aatgtttaaaacattacttaaagatcgacatgaccgggctaaattaatcataagtaaacttaataaactaggctataatataagttatgaagaaattatagcaaatattcctggtgaagctataggacgtctacacattgcacaacatttaacccaaaaaggttattttgttgatacgaaagaagcatttaagtcctgtc

SEQ ID NO: 7909 - DNA, 200 bp, Lawsonia intracellularis
ttggacataatggtttagcttatattccaaagacaacaatatctttaaaagaaggggttcgtgtattagtagatgctggagcaatggtaagttttgctcatcctatgctactaagatgtccaaaggattggcttgaagatactattgttatgcttaaagactatggtctttctgctattgaagcttatcatagtgagcat

SEQ ID NO: 7910 - DNA, 200 bp, Lawsonia intracellularis
tcacaaaaagatgagcgatactgtgttgacttagcaagccgatatcagcttggaatcacaggtggctcagattatcatggatcaggtaaatctaatgtaaagttaggtagaggccgtggaggagttcgcatgacattggctatgttagacgttttaaaagaaagacattttagaattaatcaaactatataacttcagag

SEQ ID NO: 7911 - DNA, 200 bp, Lawsonia intracellularis
aaaataggtatcaactagaatatataggttacttaaaaaataatgctataaactataaataatttttagagagttaccttttaccttttcttctttaaatatttttttaatcatctactattgacatctggcttaacatagctcactcctttgaggtatatttttgttttagttagtgggtatccctcatactctttttt

SEQ ID NO: 7912 - DNA, 200 bp, Lawsonia intracellularis
tatttttttagtatatctatatatcattattgggttgaggaaggagttcttatgactgactataaggaaacattaaatcttcctaatacgacttttcctatgaaagctaacctagtgcagcgtgaaccagagattattctttggtgggaagaaaacgctgtttatgaaaaaatgcttgaagcttcaggtgcaaagggcat

SEQ ID NO: 7913 - DNA, 200 bp, Lawsonia intracellularis
ttttatacttcatgatggtccaccctatgctaatggacatattcatcttggtacagcactcaataaaattcttaaagatattgttattaagtctcgtaacatgcaagggtatcgctcctgttatgtccctgggtgggattgtcatggattacctattgagctgaaggtagagcaggagttgggtaaaaagaaacaagaaa

SEQ ID NO: 7914 - DNA, 200 bp, Lawsonia intracellularis
tgcctctatcattaataagaaatcgttgtagagaatatgctgagaaatttttagatatccaacgcgaagagtttaaaaggcttggagtatttggctcatgggatcatccatatcaaacaatggatccaatatatgagtctgttattactcttgaacttgctaggtttgtagaaaaaggtagtgtgattaggagtaaaaag

SEQ ID NO: 7915 - DNA, 200 bp, Lawsonia intracellularis
cctatttattggtgttattcttgtgaaacagctttggcagaggctgaagttgaatatgctgatcacacatcatcagctatttttgtacgtttccctatacatgataaaagattacacacaatattcccacaagcagatcttacaacaacttctattgttatttggactacaacgccatggactcttccaagtaacatggc

SEQ ID NO: 7916 - DNA, 200 bp, Lawsonia intracellularis
tatagcactcaatgctgattttgattatgcattactccagtataaaaatgaatatattatcatagcttctgaacttgtagatatatgtttaaagcagtttaattgggaagatgcaaaagttattaaggttgttcaaggaaaagatttggagggaatgaaagctagacatccattatatgatcaagagtctatgattgtct

SEQ ID NO: 7917 - DNA, 200 bp, Lawsonia intracellularis
taggtgatcatgttactcttgaggctggaacaggctgtgtacatacagcaccaggtcatggtcctgaagattatgaagttgccttaagatataacttggatgtctattctcctttagacgatcagggaagatatttagataccgtaaaattttttgcagggttaagggttgatcaggctaatcctgttgttattcaaaaa

SEQ ID NO: 7918 - DNA, 200 bp, Lawsonia intracellularis
cttgaagaatttcatcgtattattcaaaaaaatactatccagcatagttatccacactgttggcgctgtaagagtccagttatttttagggctacgacacaatggtttataagtatggaaaaaaataatcttcgagaacaatccttaaaagccattaaaaagaatatagagtggattccctcttggggtgaagatcgtat

SEQ ID NO: 7919 - DNA, 200 bp, Lawsonia intracellularis
ttataatatgattgcttcaagacctgactggtgtatttctcgccagcgtatttggggagtccctattgtagcacttatatgtgaaagttgtggagaagtttggaatgatccttcatggatgaagaagatagcagaattttttgcaatacatcctagaggatgtgattattggtatgaagcaaagcttgaagatattgtcc

SEQ ID NO: 7920 - DNA, 200 bp, Lawsonia intracellularis
ctgtaggacttaagtgcccacattgtgaaggcgaacagtggaagcgtgagtcagatatattagatgtatggtttgattctggttcaagttttgctgcagtattagaagagcgtcctaatttaggctttcctgcagatttatatcttgagggctcagatcaacatcgaggttggtttcattcttcactacttatttctatt

SEQ ID NO: 7921 - DNA, 200 bp, Lawsonia intracellularis
ggtacacgtggagttccaccatatcatgctgtacttacacatggatatgtcgtagatggtgatggtcgaaagatgtctaaatctatgggaaatgtaacatctcctcaagaaattattagtaaatttggtgttgaaatattaagattatgggtttcttctgttgactatagggaagatgtgaggatttctaatgaaatttt

SEQ ID NO: 7922 - DNA, 200 bp, Lawsonia intracellularis
acaacgccttgtagatgcctatcgtcgtattcgtaatacttgtcgctacttacttggaaatataaatgatttaactttagatgagttagtccctgtaaaagaaatggagtcgttagatcaatatattttagatgtagtagctacagcttatacagagattcaaaaatcttacatctcttatgattttcataccgtatttc

SEQ ID NO: 7923 - DNA, 200 bp, Lawsonia intracellularis
ataagttgcataatttatgtacaacagacctgtctgccttttatttagatatattgaaagatcgtctgtatacttctggagtaagaagtcataagcgtaagtctgctcaaacagctctattttatattttacatatgttgttaagaagtatggcaccaattttgagttttactgcagaagaggtttataaatatattcca

SEQ ID NO: 7924 - DNA, 200 bp, Lawsonia intracellularis
gacacactgaaagatgataatgttatttctgtatttatgttaccattttttgaaacttcttcatttttattggatgatagagtacgtagttactgggaaacactattattaattcgggcagaagttaatcaagctattgaaccaatgcgtaagaaaggagaaataggacattcattagatacacatataacactttatgt

SEQ ID NO: 7925 - DNA, 200 bp, Lawsonia intracellularis
tgctccagagctacatacgttactgttggagttgaacacagatttatgtagtttatttattgtttcacagttagatattatgccattatcggaggcatcagttgatgctgcagttagtaaaatagatggtcttgctgtagccgttaacagagcacaaggtaataaatgtcagcgatgctggatgtataaagaacttggtt

SEQ ID NO: 7926 - DNA, 200 bp, Lawsonia intracellularis
ctaatcaccaatatccaacactatgcccacgttgtacagaagttgtagaaaatatgaaaatataaaaaattggaaaagaattttgtataatgcgatattgtataattagtttagttgcacttattatttttttagctgatcagcttacaaaattttggataacccatatcattcctttgtatagttcgattaatgttatt

SEQ ID NO: 7927 - DNA, 200 bp, Lawsonia intracellularis
cctgatttttttgatttagtgaacatccgtaatagaggtgctgcatttggttttctaaatcgatctgatattgaatggcagttttggttatttttaggtgcaacgttttgggccatagtaatcatcttttttttagcacgttctgcacattctaatgaaagatttttattttggggacttggctgtatcttaggtggtgc

SEQ ID NO: 7928 - DNA, 200 bp, Lawsonia intracellularis
tttaggaaatctttttgatcgactcaggatacgagctgtaatagattttttggatttttatattggtgactggcattggcctgcttttaatgtcgcagatatagcgatttgttgtggtggttttttagtccttatttctatgtggcataatgagaaaattaagagaaatactataaaagaataaatatgcttttattctt

SEQ ID NO: 7929 - DNA, 200 bp, Lawsonia intracellularis
ttcgctatatttggttaagctattttttcaaattactgtggtctaagaagcaaattatttatgctatttattctgataggatataacataaataatttgatatggttatataggtaccttattgaattgttagaaaaagaacgatattatcatacaacaattttgtgtttaggatgggggactatgagagaaaaggtagc

SEQ ID NO: 7930 - DNA, 200 bp, Lawsonia intracellularis
tatggtacttatattgggaagtttattatgtatttcaggctgttttggtcaaaatacagatacattgcgacatcagcttgatcaacaacaggaagaaattcgccaactaaaagctcaattgtcaggggtacaaccagctcaggctgatacatgggctcaagtccaaagtttacgtcaagaactagctagcataacagggc

SEQ ID NO: 7931 - DNA, 200 bp, Lawsonia intracellularis
aaattgatgacttcaatcatgctacaggcgcagttggaggtattgcaggtttagcaagtaaagtagaaaaaaatgaagctgcaattcgaaagattgagaagcagtttgatctaaaattgttagatgatcagcctgctccatcttcacctattagcaatacggcgagtcctcctgtaacccctcctcaaatgaattctagt

SEQ ID NO: 7932 - DNA, 200 bp, Lawsonia intracellularis
acaggtttaaataacgagtctggggcacaaactaactctcaaccaaagcaatcaactccaaataaaatagatacagctactgtcctttatgatactggggtaaaactttttaatgaacgtaagtataaagaggcattacagtcttttactgattttactaatacatatggtacacataagcttatttctaatgcttggtt

SEQ ID NO: 7933 - DNA, 200 bp, Lawsonia intracellularis
ttggcgtggtgaggctaattatcaactaggtagttatcctgctgctgcacttgattatgagcaagtcatttctaaatatccaaaaagcggcaaaattgtttcttgttattttaagcaagcattgtgtttttataaaacagggaaaaaagatgcagcaaagtttagattagaggaggttattaaaaagttcccaacttctc

SEQ ID NO: 7934 - DNA, 200 bp, Lawsonia intracellularis
ctgaggcaaaaagagctaagcaaatactaaaatctgatttctgatactgttaatatatctgtcaactggctatactttgttgaagtatagcaatggaatattaagataaaagaagtattaatgtctttatacttactatgaggttattatgccagatccaaaaagtatattgcaagatgatacaatccaaaaagttgtga

SEQ ID NO: 7935 - DNA, 200 bp, Lawsonia intracellularis
ctgatgttacagataaaattcttaaggagttatatgaaattcttgcctctgagttagcaccaaaaatttcctctacgcttatacaaccatttttagaaagcaaattttatcagcgtattagtaatgatatgcaagatgggttaaaacgtatttataaggaaatttctactataagtgatagtcctgtaaatacagtctct

SEQ ID NO: 7936 - DNA, 200 bp, Lawsonia intracellularis
gtagataaagtgaaaacagaatccctttttcatgaggcatcagaacaactttcagaagtccttaagcagacagaaaaggctgctatagctattatggaggttgttgagcaagatatagtgttacaggaagaagctacaacattgcttaccaaacttaactcttcccacattaatattgatccagattttattcgtcttaa

SEQ ID NO: 7937 - DNA, 200 bp, Lawsonia intracellularis
agagattattcatctatttggagaacatcttagtagtgttatgctttctttaagctttcaagatctcacaggccagaggattaaaagagctgtttcagcattgaaagaaatagaaaagacagttgtagaactttatttatcagcaggattattaatgcaagctcgtgacaaaaatccaaataagagtatagacgaaattg

SEQ ID NO: 7938 - DNA, 200 bp, Lawsonia intracellularis
aagctgatacacggcaacaagttttggcattaaaggacatacaaattataggttctgagctaaaaggaccaacttctggtgtagcacaaaaagatattgatgaacttatggcaaaattaggtatggactaggactaaaatattaggtataagcttttttcttatggacccatagctcagttggtagagctaccggctcat

SEQ ID NO: 7939 - DNA, 200 bp, Lawsonia intracellularis
aaccggcaggtcggaggttcgagtccttctgggtccaccaaattttaacaccttacaagtagtaaggtgtttttttataaatagcatgattgttttttttcattagtaatgttgtatagtatctaaggttaatgtatagttaaactgagatagtaatcgtgaaatattagtttatatgaactagcaataacttactgttg

SEQ ID NO: 7940 - DNA, 200 bp, Lawsonia intracellularis
tactgtttaaaaaagtatatttatatcaataactcaatgaatggatcaacaatataagataatttaatattctttaatatattattgagaatataggtaggaaaaaaatattatggcaacagtgtggattaatgctggagaagtttctggtgacttacaggcttcagttttattaaatgcaatgaaagaatatcagcctg

SEQ ID NO: 7941 - DNA, 200 bp, Lawsonia intracellularis
acataaaagcatatgggatgggtggagaatatcttaaagctgcaggacaaaaaaatttgtttagtattgatgagttatcagttttaggtattgcagagatttttacaactataccacgtgccatacagatattgagaaagataaaatatgagcttaaaatacttcgtccagatgttgttattcttgtagatgctccagag

SEQ ID NO: 7942 - DNA, 200 bp, Lawsonia intracellularis
tttaattttcgtatagctaaaattgctcatgagcttggcttgttagtttgctattttattccaccaaaagtatgggcatggaggacaagtcgaatccactttttgaaaaaatatgtagattgtattattagtatattaccttttgagcctaaattttatcgccaatttgggatagaaatagaatatgtaggtaatcctct

SEQ ID NO: 7943 - DNA, 200 bp, Lawsonia intracellularis
tactgatcttgttaattggcctagaatagagcatatacaaccagtagaaggtcgtataggtattatgcctggaagtagaaagaaagaggttgagcgattacttcccgagtttagctatgcagctgaagagctatatactaaatatcctcaattatctttttattgtattaaagctccaaatatttctacaagctatttaa

SEQ ID NO: 7944 - DNA, 200 bp, Lawsonia intracellularis
aatcactatggttttcttctatcccgttatgtatagaaacatcagtagatcgatattcagctatgcgctcatgtgaatatattattgctgcatcagggacagcaacattagaaactgcattagtaggtgttcctacagtagttacatataaagtttcttctttatcagcactagttgctcgtttagctttaaaagtaaag

SEQ ID NO: 7945 - DNA, 200 bp, Lawsonia intracellularis
tgggtgagtttaccaaacttgattttaggtaaagaagtatttcctgaacttttgcaagaaaatgcaaaaggttctaaaatatcttttattttagaacattggatgaaacaacaaaatataacaaaagaacttcaaaaagatcttcatgagataagaaagcagtgtggagagattggtagtgtgagccaggcagcacgaat

SEQ ID NO: 7946 - DNA, 200 bp, Lawsonia intracellularis
catagttcaaaaatttttgtctcactaaggttatatgtcaaaaaaagatcagtatactcaacaaagcacttctaaaagtatattatgcctaatgttgactgcaggttctattggagtacatttgatttcaggtatgttggtaggcgtcttatttggctatagtattgacttttgccttgatagttatccatggttcagtg

SEQ ID NO: 7947 - DNA, 200 bp, Lawsonia intracellularis
gtattgggctgttatttggtattattgcaggttttcgtcttatatggatagatacaaaaaaaatgatacataaggacccatatgagtaggataaagagactacttcatctacttgagttaatttattggaaaagagaaatttatagtcctgaaatacgaaaaatatttgtttggcaaacaaatattatctgtgtatcatt

SEQ ID NO: 7948 - DNA, 200 bp, Lawsonia intracellularis
tattattggtataggtacatttttttattctaagtggatgatatggttttctattgttgcgctaatttctttatggaatttttatatgttggtaaagcaggtaatgaaagttgtaaataaaccattgatagcttcattacatatttcttttttaataaatacaacattacggatcttgattacatgtctattagggtata

SEQ ID NO: 7949 - DNA, 200 bp, Lawsonia intracellularis
tagccttagtaaaccttcgtgctcctgctttagcagtattgttaggtttttgttctattataatatgtatactaggtataaatataaaggcgctattttcaaaaaaacagttgaatgtttttcacatagactgtgaagaaaatagtaactagtatagctggatgagaataaaaggtggagtaaaaaaatggctgaacaac

SEQ ID NO: 7950 - DNA, 200 bp, Lawsonia intracellularis
ttcctgaaccagttcttttatctgaattgcttcatatggataaagttactattgctggtcagctagttgaatttagacatgtattttatacttggattgcaatgttgatcctttttattgtaggattgattgtccggcgtaaattgacacttgttccagggagattgcagaatttttttgaagttcttattagtagcttt

SEQ ID NO: 7951 - DNA, 200 bp, Lawsonia intracellularis
gaaaattttactgtaatcaatataggcgaggagggacgtaaattttttcctgttcttataggtatatttttacttattgcagttgaaaatttattggggcttatacctttgtgtgatgctcctacagctaatattaatacaaatattggtatggctatatttgtatttctttattacaattatgaagggattaaaaagtg

SEQ ID NO: 7952 - DNA, 200 bp, Lawsonia intracellularis
ggggttccattatatccatcattttatgggaccgagtatagtcctagctccttttatgataattttagagtgtatttctcatctagcacggccattatcacttacactacgtctttttggtaatattaaaggtgaagagatagtcttacttctattttttcttatggccccattagtaggcacaataccagtatattttt

SEQ ID NO: 7953 - DNA, 200 bp, Lawsonia intracellularis
tatttttacttgctaaattgttacaagcatttattttttatattcttactttgatctatttaaaaggcgcattagagtctgctcattgattatgaaaaaaatgattttttatatacaattataactattactagtgaggagtaatattatgttcaaaggtgttatagggatattagtaacctttattgcattaggtatta

SEQ ID NO: 7954 - DNA, 200 bp, Lawsonia intracellularis
caagtgttgcatgtgcagcagatcctgttattgttggacatgtggtgaaactcgacccttctagtttaggtctagcaatctttggttgtgcaataggaatggctttagctgcacttggctgtggtataggacaaggtcttggtttaaagggtgcatgtgaaggtattgcacgtaatcctgaagcatcagggaagatacaa

SEQ ID NO: 7955 - DNA, 200 bp, Lawsonia intracellularis
gttgctcttattttaggtcttgcatttatagagtctttagctatttatgctcttgttataaatttgattattttatttgcaaacccttttgtataaaagctagttagatctaataactagattaagtgctaagtgataggtatgtttcctcttaaaagtgaaagaattcctttagccacaattcgaaggcttgctttata

SEQ ID NO: 7956 - DNA, 200 bp, Lawsonia intracellularis
tgttcaggttcttgaagatatagaacgtaataatacagaagttatttcttctaaaccattagcagaagcgtgtggtgtaaatgcctcacagcttcgtaaagatttagcttactttggtgaatttggtgttagaggtgttgggtatgatgtaacaagtcttattaaagctattaaagtatcccttggcgttaaccgtgaat

SEQ ID NO: 7957 - DNA, 200 bp, Lawsonia intracellularis
ggaaagtagctcttattggcataggaaatcttggaagagcattattgaattatgaagaatttaagcatcgtggctttcatattattggagcatatgattgtgatcctttcaagattggagagcatgtttatggtcttgaagttacttgtacaaccaagttaaaagagaatgtaagaaaacaaaaaattgaattaggtatt

SEQ ID NO: 7958 - DNA, 200 bp, Lawsonia intracellularis
attacaacgcctccagagcgtgctcaaaaagcagcagattctcttgttgatgcaggtgtgcgtggtattcttaattttgtttctgcaagaattcaggttcctgagcatgttattgtagaatatgttaatttttttcactatttgtattcgttagctttcaaaacttctattgcttagcggtactatagttaacttataaa

SEQ ID NO: 7959 - DNA, 200 bp, Lawsonia intracellularis
aattgtttaaataagatagtttttttctcttaaaaaaggtttattcctttttaggaatattttttgcataattttctttaatagaaagtcttcctcagtgatatatttaaataggtgccagttatggctgcttttcgattctctctacagcaagtgttagattatcgagaacagttatctgaacaagctcgtgtagagtt

SEQ ID NO: 7960 - DNA, 200 bp, Lawsonia intracellularis
agcaaaagtaacagcagcagttatttctgaagaaagaaaagtaaaagagcttcaagaagctattcatactcaagagactaatttaagagctcttgatctaaataatataggggagcggtggttattagaaaattttattaaaggtcttcaagaagacttacgtattagtttagctcaacttcaaactttacagaatgcat

SEQ ID NO: 7961 - DNA, 200 bp, Lawsonia intracellularis
taaaagaagcacagggaaaagtagctcaacttgctaaagaacataaggtattagaaaaacttaaatctaagcaggcagaacgtcatgcaaagagtgaacgtcaaaaagaacaacaaaactatgacgaaacagcctcaatcagattcaactctaagactttctagactatgtcgttggattttgatccttgggacatttaa

SEQ ID NO: 7962 - DNA, 200 bp, Lawsonia intracellularis
attattatttttaggttctatgtttattttttctgagcctcaagtagttatagttgcaaataaggaagaggaaataaaagaaaataagagccctgatacttctattaaaaattttgttacaaaaaaagtagaaagtccattagcatatgcccaaccaactacagcagtaaatgttactcctcctgctcctaaagtacgtc

SEQ ID NO: 7963 - DNA, 200 bp, Lawsonia intracellularis
agaatacatctcctttttctcaagatattcagccatttggggacacagcaaataatttaggagaggcatatccagtaacaattccaaaagcagatcctaataatatttcaacaaggcctgatgaagctcttgtaacaccagcgccagcaccaaaattaaacccttttgttcctaaagactctgtccagcgtaaacaagaa

SEQ ID NO: 7964 - DNA, 200 bp, Lawsonia intracellularis
gagcttaatcgacgtgaacaagaacttttatctttacagcaacagatgcagtctcgtttggatgaattgcatgctcttgaaggaaaaattcagaagatgttagatgaggctaataatgttaaagatcaaaaactaacacatcttatagatgtatactctaatatgaagccaaaacaggcagctgatgttttagctacgct

SEQ ID NO: 7965 - DNA, 200 bp, Lawsonia intracellularis
tgatccaaaaattgcagtcaaaatattgtctggtatgcgtggccgtcaagcaggagaagttttaacatatatggcaccagagccagcagcgaaactctctgaaatgttaagtcgaacccaacttcctaattgatggtataaaaaagaaagagtaccatgccacgtttgaaatttacattagcttatgtaggtacagcata

SEQ ID NO: 7966 - DNA, 200 bp, Lawsonia intracellularis
tcatggttggcaaacacaacgtcgaaaaagccttccagagttaccgactattcaatctacattagaaaaggttattgcatctattattggaaaaccagttcgtgtatgtggtgctggacgtacagatgctggtgttcatgctgaaggtcaagttgctcacgtagatattccagaatcaaaattgaagcttgattggcagc

SEQ ID NO: 7967 - DNA, 200 bp, Lawsonia intracellularis
tagtacttaatgcaagtctacctaaaaatatccgtgttgtacattctttatatgtagaagatacattccatgcacaacatgatgctgtacaaaagctttatgcatatcgtttgtggcttaatcatcgatatactccccctgttctatatccgtttgtatggtcttgtggtagattagatcttgaagcaatggataaagca

SEQ ID NO: 7968 - DNA, 200 bp, Lawsonia intracellularis
agcacatttcttttagggacacataattttgtaagtttacagaatagaggaactaagttgttatctactgtaagaactatatctgctctttacagagagccctcacagtttttttcattgaatgaaagtcatgaagtgacatggttttttaaagcagatggttttttaaagcaaatggtaagaaatataatgggacttct

SEQ ID NO: 7969 - DNA, 200 bp, Lawsonia intracellularis
tgtactagttggtcgtaggaaaatacaacctgaaaagataccttatattttggaggcaaaagacagaagacatagtgcacctactgctcctgctcatgggttgaccttgaaaaaagttttttattcttaaatcaatttttgatctgttttcataaatatattgacgttacatattttttttgtattaatttatttcttct

SEQ ID NO: 7970 - DNA, 200 bp, Lawsonia intracellularis
ttctttatgttttttacttgtattattactagttattataaaataagctaacttgtaatataagtaataaaatgtttatattgttatatagtttgttagaaaaataaatctagagaaagtcttgatttttatagcacgttgtgtagttttaataaaaataagttcagtataggagtatgacatgccccaggtcgctgcgc

SEQ ID NO: 7971 - DNA, 200 bp, Lawsonia intracellularis
gtataagcgagcaacaagaacaatggcttaaggattatttccgtacaaagagtgcaggtgcagagtttgtcttgccatgggttgtggataccttttttcgtgctgttacaaatattaaaaatacattttcaaatgtagaattaaaagccattattgaagcacataaggattttaaattattacctgcccatactcgtctg

SEQ ID NO: 7972 - DNA, 200 bp, Lawsonia intracellularis
tcttatcttatgttaagagtaaatgatgcatgcgatctttcttctgtacacaataggtatggtgttagtagatcaagtcttgaagctaaattaaagcgtcttgatgatactcaagctgcagcactaatggtttgggcttctgctttttgggtaagtcgtaattgttccgcagataacatggatgagtatattacttctta

SEQ ID NO: 7973 - DNA, 200 bp, Lawsonia intracellularis
ttagtacatactaagtattaacgtaagcttaaaaaaatattatatagttagtgatattaatttttataataaccacttgttataatttataataacagtggtttttttattaactaacaagttattttattcttttatagctttatctgtaataaagaagtaaagttaggttaaccattagttaacctttaagtagatag

SEQ ID NO: 7974 - DNA, 200 bp, Lawsonia intracellularis
tagttgttgttattaagaataaaacatttattaccctgaggactgcttcaggtataatgtagagataagttatgggtaaatatcgttttataatgcatgaagagaattgtataaactgtaaagcttgtgaaaatgtttgtagaactacacatgatacagctccaggattatggttagggaaactgctttatacaacgcca

SEQ ID NO: 7975 - DNA, 200 bp, Lawsonia intracellularis
gaaggtaaaatggaagcacaagtaaagtttagagcttgtcctcagtgtaatcatgctaagtgtgtatctgcttgtccaacaggtgcgcttattatgagagacttagatgggattgtatatgttgatgtagataaatgcacaggatgtggattatgtctaatagcatgcccccatgatcttctttggaaagatcctaggac

SEQ ID NO: 7976 - DNA, 200 bp, Lawsonia intracellularis
agggaaaattgtaaagtgtgatatgtgttatgaaagaatggatcaaggtctagagcctagctgtatagcaagttgtcctacaaatgcattggaacttattgaaagaaaaccaggagagcctttacataagatccatcataaaaaatgatattaagtaatctcttgaaaggttgaaattggctaacttttgataaagaagt

SEQ ID NO: 7977 - DNA, 200 bp, Lawsonia intracellularis
tattgtagaagatgaaacagttaggtttccataggtagaaaatatgtaaaaatatattcacgtaaagcttggggccaaggacggatagaaatacctgttatttgacggtaacgttcacagtttaacacagaataggcagggcgttttgcaatgtttttcccccactcattagtggaaataccttgtattgtacaagataa

SEQ ID NO: 7978 - DNA, 200 bp, Lawsonia intracellularis
gtttgcttgtcgaatagcttctgctgcaaactcacaccaagatgcttgtccactattagcgatatggaatattccttttcctttgttttctactagagatatagaggcttctgctagatccggtgtataggttggagagccaatttgatcatgtacaacatgtagaaagtttttagtttttgctagttctaagattgttt

SEQ ID NO: 7979 - DNA, 200 bp, Lawsonia intracellularis
gtataaaattttttcgtcctggcccaaatagccaagatgttctaataatagaatagttttctaatttaagttgaagtatagcttgttcaccagcaagcttactagagccatatacagagagaggatatggtacgtcttcttctacgtatgggacattttttgtcccatcaaaaacaaagtctgtactaaattgtataaga

SEQ ID NO: 7980 - DNA, 200 bp, Lawsonia intracellularis
tgagtagatgttccttttaaaattgtacctaataatgagggaagtgttctattaataagtaatgcatcattactatgtgtttctgcaagatctacttgagtccatgcaatggtattaaagatagcattaggagaacatttatcaatgtaattactcagaaaatctggttgtaaaatatctccatcttctctaccaagtgt

SEQ ID NO: 7981 - DNA, 200 bp, Lawsonia intracellularis
atgtacatcccagtttttttgttgaaggcacctaacaagagacttgccaagtaaacctgtatttccaccaaggacaagagctactttattattcacaagcgatccttataccatctattcataaattctttatagtctcctgaaagaatattttgtacccaatctctatgagagagataccagtttactgttgcagcaag

SEQ ID NO: 7982 - DNA, 200 bp, Lawsonia intracellularis
ccctttattaaatgttatttgtggcatatatccaagttcttttgctgcttttgagaaatccatagcatatcttcgatcatgaccagggcgatctttaacatgatgaataagagagtttggtttattaagaagatgtaaaatttcttttactacagcaagattggtttgttctgcagagccaccaaagttatatatatttc

SEQ ID NO: 7983 - DNA, 200 bp, Lawsonia intracellularis
ctggtcttcctttctccagaacaagtaatatccctcggcaatgatcttctacatgaatccagtctctgacttgtagtccatctccataaataggtagagattcatccataagtgctcgatgaatcataagtggaataagtttttctgggaattgatagggaccatagttatttgaacaacgagtgataatggtatttatt

SEQ ID NO: 7984 - DNA, 200 bp, Lawsonia intracellularis
ccatatgttttatatgctgcatgaacaagcatatcagcacttgctttagatgcagagtaaggactattaggggataatggtgttttttctgaaaattttccattaattccaagagagccatatacttcgtctgtggaaatttgtataaattttggaacattcattgctcttgcagcatctagaagaatttgggttcctag

SEQ ID NO: 7985 - DNA, 200 bp, Lawsonia intracellularis
gatgtttgtggtaataaaaggtagagcatttgtaatagagcgatcaacatgactttctgctgcaaagttaataatagcatcaaaggaataggactgtagaagagactgaacaagtgttgcattaccaatatcaccatgaataaagaggtattgatcaggttttgttgtttcgatctcttttagattataagggttccctg

SEQ ID NO: 7986 - DNA, 200 bp, Lawsonia intracellularis
cataagtgagattatctaagtttacaatatagacatcttttaactctttcagggcaagttggatgaaatttgttccaataaaaccacatccacctgttataagtaattgcatctatactcctattgagagataagttaactttgcaaagagaaataattgttatgttaggttctaaaagatgtttatttatgtatgataa

SEQ ID NO: 7987 - DNA, 200 bp, Lawsonia intracellularis
atagatactgaaatattagcagagagcctttagtaggtcaatgtattcataattataatttagttgtactgttttagttagtggtgtttttattatctagtaattgttagtataaaagtatatcaggtgaaatgtattttatggtagtttatttagataggggtacatttttataatacatattggtatgttttgttatt

SEQ ID NO: 7988 - DNA, 200 bp, Lawsonia intracellularis
atgaaatatggtattcttttaaccacgtttggatcttttaatttgtactgcaaagtatctttttcaaattttgagtctcaagttcaagaatgttttcctactattcctattcgttgggcatttacttcaaatgcgttaaagaaacagaacatatttagggatgaaaagataggtcttttagatgaagtattatctaagat

SEQ ID NO: 7989 - DNA, 200 bp, Lawsonia intracellularis
ggcttttgagcagtttacacatatcgcagttcaacccttacaagttattgctggtatggaatattcaggaatagtatcaaaaattaaaatactaggtgaacgtcttggtttttcttccattttagtaggagagcccctaataacaagttctattcattcaattgaaagagttaaagaagctattttttctgttattcctt

SEQ ID NO: 7990 - DNA, 200 bp, Lawsonia intracellularis
ataagaggaagcaaactgaacctgttatttttatggggcatgggaataaatctatgtttaaggataaatatagaaccttatccattgctgtgaggaataatgatccattagtatttataggaacaatggatggtagttataggttagagcatattttatcagctttggagaatgcattgcagactgtttggttaatgcct

SEQ ID NO: 7991 - DNA, 200 bp, Lawsonia intracellularis
ttttttactattattggaaaacatgtattagaagatatggttggaaagtcaccaaattcatggcagtcacgtttagaagcagctggtttttcatgcatacctattttaaaaggcttgcttgataataaggcattctcagatatatggatagaacatttaaaaatagtaataactaatctatataatacttgaatatatct

SEQ ID NO: 7992 - DNA, 200 bp, Lawsonia intracellularis
tatatagaagtataatagtttatactataagttggttatacattaaggatattatatgtatcattttaataaacaacttgtattatactatattgtagcactatgcttgtatttattagtaaatatttcaatagctaatgcacgtattattgtagtaatttatggtggagatacatgtataacagcccagcaggcttgca

SEQ ID NO: 7993 - DNA, 200 bp, Lawsonia intracellularis
gtatagctattgctgaagctttattaattgaatcagaagagtatctttctcataaattttctgagcctagacgagaagctataaaaaaatattttagtatggtttctcctggtttagtattaaatactactgagttagaaccaacctcattggaggatggaagaataaaaggcgtatttgatgttcctatacgtaaaaca

SEQ ID NO: 7994 - DNA, 200 bp, Lawsonia intracellularis
gcattatatcgtttattacgtgagctaggcctctcttatactacatcgtttatacaaccatatgtactaagtatgtttaatgttcctgatgaaatagctttgcttgataaactatttttattagaacaggtaactggagttgttcagagtgaaaaagttgataatacttctcataaaatagagctacagcttagttttga

SEQ ID NO: 7995 - DNA, 200 bp, Lawsonia intracellularis
ggatggaatatgggtggcaaagcttttgggggcagcgcaacctattcaggcttctggttactcaatagacaatatttggagagagatctggggagcttttttttctcaacgtcaaaaagaaacttcttcatatttacaaagctatttattaagggtttcaggatggaaacatgctgtagaagtagaggcattgggaaaga

SEQ ID NO: 7996 - DNA, 200 bp, Lawsonia intracellularis
ctttatctcattgggaatctattacaaaaaatgttttgttacatgaagttagtattagtaagggagtaatagcagctcagtggacgttaactatattaaatatggatgggtttgaaaaacagataaaacaatatagcttagcacgaaagctacactatgaaataaagccgtttgaggctatcataaaggataatagtatt

SEQ ID NO: 7997 - DNA, 200 bp, Lawsonia intracellularis
gatatacaatgtattggtaactaatataaaattacaatttaggttatgaataactattatgaattttttattatttgaaattatgtatatttaataaatatagcagatagaggcatagtatatatttattatatatcattcagcttagtataaattaattctaatctacatagttaggtatagtattaaggagttaatta

SEQ ID NO: 7998 - DNA, 200 bp, Lawsonia intracellularis
ttttctatattatttttaaagatagtaagatagaacaaaaatactttttgatagtagaaggttgttcatagtgactacttttttattaagattaatatccaacttcctaacttgactatagtatattatataggtatatatgcctgatcttggtttccttaaaggagggttatatgaaaagaacataccagccaagtaaa

SEQ ID NO: 7999 - DNA, 200 bp, Lawsonia intracellularis
ctgaaacgtgcaaggacccacggctttagagcaagaatgagtactgctaatggtagggcaattattagacgtcgacgtgcaaaggggcgaaaaagattagccgcttaacatacccaaaagaaagtcggatagtcgatcggaaagattttttagtttgttataaattaggttatcgttttttttctactcattttattttt

SEQ ID NO: 8000 - DNA, 200 bp, Lawsonia intracellularis
tttgttcgtccacgattatccaatatagctatatcacgtttggggttagctgttagtaaaaagattgggaatgcagttgtaagaaatcgtattaagcggttgcttcgagaatgttttcgtttacatcaagaatatataccaaaatcagtagatatagttgttgttcctaaataccatcttagattagtacctattacatt

SEQ ID NO: 8001 - DNA, 200 bp, Lawsonia intracellularis
atctatggttatccaagatattatctttatttcaaataagatggaaaagtttttatctactaatggtattgaggtatagattagtgctaggttattaaaatatgcttataataagtgctataatgtcaaggaactataataatagtaagggagatttcatttaaatgaaaatgagttttccttgttgtttttttgttact

SEQ ID NO: 8002 - DNA, 200 bp, Lawsonia intracellularis
attatttatctttatcaaaaattactatcaccttttagtaaaggttgttgtcgtttttacccttcttgttctgagtatgcgatagcttctgtccgcaggtatggggtattaagaggttgttttttgatattattgcgcattttacgttgccatccattttcctctggtggctatgatcctatcccttcccagtttacctt

SEQ ID NO: 8003 - DNA, 200 bp, Lawsonia intracellularis
tttgttatatcagcaggagcatcaaaaatatcatggaagataagcgtatagttttagctataatactttctcttgttgtctttcttggctggcactcttttgctgagtatatgggttggatttcaccaaaggtacagcacgttgcaaatgaacgacattcttctgtagatcaaactgctacttcaaatatagctttggat

SEQ ID NO: 8004 - DNA, 200 bp, Lawsonia intracellularis
tctgttcagtcagtattttctccacctacaggtaaagatgtatatattgagacaccactgtatatagcaaaaatacactctagtggtggtattttaagttcatttattttgaagaaatataaggtgaacttggataatacttctcctttagtaaatcttgtaagtcctgaagcatctcaagcaatgccattaggtattac

SEQ ID NO: 8005 - DNA, 200 bp, Lawsonia intracellularis
tttaaatggccaaccctcatggagtaatggtaattggtcttttttaggtggtgacttatatctcaagccaggagaaacaaaagagcttacttttgttggaattgttaatggagttaaaataatacggatatttacatttaatgcagatagctatttaattcacgaaaagttacaactagcttcagaaaaacagaatagtt

SEQ ID NO: 8006 - DNA, 200 bp, Lawsonia intracellularis
gtcctacaaaagttggcttacttgtagctgcaacaccctttggaacaggtcaatatgatcctacacgtatggcttggagtattaaggattcatttaaagaggaaacaagcatagataccttaaaagaaaagggtattcaggagtcaggtgagtttaactggggtggagtaatgagtaattactttatgaatgtagttgct

SEQ ID NO: 8007 - DNA, 200 bp, Lawsonia intracellularis
ttatctgatccactatatcttactattaaaggacggatccaaaatgatgtttggcgtgtagcacttgaacgttcaaatgttttaatccctgctgaaggaactacctccattacagttaactggtggtttggtcctaaagatcgtgaacttttatctcgtgctccagataagcttgaaaatgctatagattttgggatgtt

SEQ ID NO: 8008 - DNA, 200 bp, Lawsonia intracellularis
ttcaattattgctaagcctcttttaacagcacttacatttttttatgaatatacagggaattggggagtagctattattgtccttacattatgtattaaaatagttttttggccattatcacaaaagagttacaactctatggagcaaatgaaaaaacttcaaccaatgatgcagaagttacgtgaaaaatatgctaatg

SEQ ID NO: 8009 - DNA, 200 bp, Lawsonia intracellularis
atcgtgatacattgaatcgtgaaattatgcagctctataagacatataaagtaaatcctgctggaggttgtttgcctattttgctgcaaatacctgtatttattggtttataccaagcattgttaaactctatagagcttcgtcatgcaacttttatttattacttgccttttacccatcttgtttggctagcagatctt

SEQ ID NO: 8010 - DNA, 200 bp, Lawsonia intracellularis
tcagctgctgatcctttttatataacaccattattgatgggtgctagcatgtttttacagcagaagttgactcctgcatcaggtgatcctactcaacagaaaataatgatggttatgccaattatttttacagttatgtttcttaatttcccagctggacttgttatttattggctatttaataatcttctttccattgg

SEQ ID NO: 8011 - DNA, 200 bp, Lawsonia intracellularis
tcaacagtggtggatgcttcgtaaggcataatctttgaggagaaagaggttttcatggaagagttcagggagtttgaagaaagaacacttgatgaggcaatacgtgctgcatgcaaattttttgatgcaacaagagaacgtcttgaaatagaacttatccaagatgcaaagaatggtatatttggtcttgtaggtgcaag

SEQ ID NO: 8012 - DNA, 200 bp, Lawsonia intracellularis
aaaagcacttattcgagcaagacttgctcaaatgcagtcttcggtagacacattaaagcagaaaaaaatatcatcattatcattgagtaagaaaacaaaaaaacaaaatagaaaaattaaccatcatcaaatagaccaagttgggaatgtgggagaaatttctacacagcaattaaaatcatcttataatcaatcattaa

SEQ ID NO: 8013 - DNA, 200 bp, Lawsonia intracellularis
ataatacagttgtcagagaagaatttccacaggttgataataaaatagagagagaaaaggataatgagtttagtcagcttttagatttatctatagaaaataaaggtaggttgggtccggaagttgcaacactagatgtcaatgaagaattatttaatgataattatgatggtaccacaaagaattttagtgaattagat

SEQ ID NO: 8014 - DNA, 200 bp, Lawsonia intracellularis
caagataaactaattactgaagcaactaatgttgtaacaaagcttatcatccctatacttggaaatgttcctatagaagttactattcttaataatagattagatgttcatgttgattgtggtgaatattcaggacttatgattggtcgtggtggtcaaacattagcttcattacagtatttatcttctcgtattttaag

SEQ ID NO: 8015 - DNA, 200 bp, Lawsonia intracellularis
tagaataatgtcaagttctatacgaatacagtttaatattggtgattatcgtgagcagcaacatgaaagacttcgtcatttagcgttatctttagctgagcgagtgagaaattctggtcgttcatgctctacccgtcctatgagttcttatcacagaagaattatccatctaacattgcaaaactatccagatattcaaa

SEQ ID NO: 8016 - DNA, 200 bp, Lawsonia intracellularis
cacgcagttctggagatgggatattaaaaaggataattattcaacgtcgtcgtcaagaaagacgttaatatcttttgtttaagcatagatttttagttattttatagtttgattcatatagctatgtataattatgtgtgatactattgctgcaattgctactccttcaggaactggtggaataggaattattcgtataa

SEQ ID NO: 8017 - DNA, 200 bp, Lawsonia intracellularis
gtggtccaaagtcaaaagaacgtcttacagaattatttcattcagtttcgccaaaatttacagactttaaaccttggatgttacacagagggtatttagtagcccctaccaatgaatttttagatgatattttggcagtttatatgccagcaccatatacttttacaggggaagatgtggtagaacttcattgtcatggg

SEQ ID NO: 8018 - DNA, 200 bp, Lawsonia intracellularis
ggacattttttattattaactatacttgaaacagttctttgtaagaatattcgtcttgcaaaaccaggtgagttttctcagcgtgcgtttttaaatggacgaatggacttaacacaggcagaggcagtagcagaactaatagcagcatcttctcgtaacgaagtattattagcttctaatagacttaaagggctacttgg

SEQ ID NO: 8019 - DNA, 200 bp, Lawsonia intracellularis
tcagaaaattatagatattcgtagacgaattgaagaacttagagtatggatatgcttagccgtagacttcccagaagaagagtcaggtattttccctttagaaaaatttattaatggactgttagaaattcatgaaataattcaaaagttgatacatgcagcagaacgttctcgttgttggaaagaaggtgttactgttg

SEQ ID NO: 8020 - DNA, 200 bp, Lawsonia intracellularis
cacttgctggtgctgttaatgcagggaaatcaagtttattaaatgcattgcttggaaaagagagggcaattgttacagagcaccctggaacaacacgtgattttttagaggaatgtattatagttaatagcctttcgattcgtcttatagatactgcagggttgcgtgttacttctgatccaatagaagaacaaggaata

SEQ ID NO: 8021 - DNA, 200 bp, Lawsonia intracellularis
cagaaaggtcgtgaaaaaattgatgaagcagacgttatattatttattattgatgggacggttggtgttacagaagagtcaaaattgttaattaataattttggagtagaacgtacaatccttgtttggaataaggtagatttgaaagtacctccttcaaattggactgaattatatacctcgagccaggtaagtggaat

SEQ ID NO: 8022 - DNA, 200 bp, Lawsonia intracellularis
atgtgtatcagcaaagacaggtagtggtatagaagaattattagtactattatataattttgtgctatctcaacataatgcccaagaaccaacatttgatactattgtccctaacatgcgtcaagtagaagtattttctttagtacttgaagagattagaagtctttatgaagacattcgttcaggcatcccatatgatc

SEQ ID NO: 8023 - DNA, 200 bp, Lawsonia intracellularis
tttgtgcagtgatgcttgaaaatatatcttcaatgcttaattcaattataggttttgatacaccagaagaagtccttaatcgaatttttgcatcattttgtattggtaaatgaagtatgaatgaagaatcagtatacaatggtaagtctgtttcaaaggaagatattaatattttgcctattattacttataagggcaat

SEQ ID NO: 8024 - DNA, 200 bp, Lawsonia intracellularis
ataaaagttgtgcagacagaaaacgaacttagagatgcattggatcttttaaaagatgaaactgttcttgggtttgacactgaagcaagaccatcctttaaaaaaggaaaatcttatcctactgctttagtacaactagctagttcacaacacgttatacttataagactaagtaaggtccctttaggagaattattagt

SEQ ID NO: 8025 - DNA, 200 bp, Lawsonia intracellularis
aaatattctctcttgtgcaaaaattattaaggcaggcgttgccattcatgaagatatacgcttattacaaaagttacatccttttgaagcagaaggtattattgatattgcagaaatggctcgtcgattgcaacttaaagctcaagggcttcgtacattagctgcaaatattttaggctgtcgtgttagtaaggctgtac

SEQ ID NO: 8026 - DNA, 200 bp, Lawsonia intracellularis
agtgttctaactgggaaaaaaaagaattgtctcctcaacaagttttgtatgctgcaacagatgcatgggttggacgagaattatattttaagctccttgaaatgggtgcataatttattatttatattgtctttttaccataatggagtaaattttttattttgttcattcttatcataaggtaagatggttttatgcaa

SEQ ID NO: 8027 - DNA, 200 bp, Lawsonia intracellularis
ggtcctccatttcttattataccttgggaaagagactttttagaatgtttatcatctattattataaaggaaacagatggacatttagataaagctgctgtgatttttatgcatgatcgtccaagacgttatttaacagcatattttcaacaacatcccgaactttccaagccttgcatcctcccttatattttgacgat

SEQ ID NO: 8028 - DNA, 200 bp, Lawsonia intracellularis
tcaagaattgttatcttgtctttatttggagcaacatacttctttatgttatgaagcaggtcttcttgatcaggtagacttacttttttcctgtgtagaacaactatcagcattgaatgtctccttattcaatttattatccaaaggtggagaagttgggtttttcccttggggtcttcagttggcttcagtctttgaag

SEQ ID NO: 8029 - DNA, 200 bp, Lawsonia intracellularis
aatgttttactcaaggtcttaagccaagagatttactttatactgaaggtgaagtggcgccttttggtactgcattactagcatcattaggtcaaatttttttgttatataaacaaaaattagaacaagaagggatgacaacccctgcattaaaagcatatgtgctagcagagcagattcgccaaagtacttttgactta

SEQ ID NO: 8030 - DNA, 200 bp, Lawsonia intracellularis
ccatcctttcttaaacaaaaaagtatatttcttgcaggatttagtacattaactggtactgagaacataatttttcgatatttatgggaaaaaggtgcaaaaatttgtttacatgtagactcttctcttgctgatacaggtaaaggacactgggcatgtagctcacaagctaaatggatacaatcttggaatgcttctac

SEQ ID NO: 8031 - DNA, 200 bp, Lawsonia intracellularis
agagttagtttttcaaactaaaccagtaaaaaaaacatggcatttttttgctggttatgatttgcactctcagttagaaaaattacaggatgatttttcattacacgaagatatacaaacttctacagccatagttttaacaaatagtaaatctcttcttccaatattacatcatttaccacataaaaattgtaatattt

SEQ ID NO: 8032 - DNA, 200 bp, Lawsonia intracellularis
ctcttggatatcccctaaataaatcgttattatttcgtttgttagaaaacatttttaaaattcgtgagttgcaacaagaagacggtacaatctattggaaatctttattacatcttattcgacatccatatcttcgttttcttaaaatagatggttttgaattgtatagtttattacataagctagaacaatggatagtt

SEQ ID NO: 8033 - DNA, 200 bp, Lawsonia intracellularis
aatggtcagaaatatattgatttaaacatgttttttagggaggttgagtatgaacaacctcacaaaaagtatgatttttctgaaagtgaatgtttgttacttaagcaacttattaaggttacagtagaaaattgtataactattgatacccttgcaaaatttgcagattttttaagtatattgtgtgatttccttttgca

SEQ ID NO: 8034 - DNA, 200 bp, Lawsonia intracellularis
gtttgggtatgagagttggcaacgtttccctctagatgctgaatgtttatttaggttagtccataaggttattcctgcattaaaggataatcgtatggcacatactgtattatcatgggatttactccaatcaatggttgtagctttgattcatgatgaaagagttccatttgaagcggatcctataactggcttacaag

SEQ ID NO: 8035 - DNA, 200 bp, Lawsonia intracellularis
ttcttggaatgctagaaaccagattattacatttttctaaggtatttcttatagatgtaacagacgatcagcttccaggaaatcctataagaagttctttattacctgatagcttaagaaaaatattaggactacctaatgcacatgatagagatgtattgacagcatatactttttatagattgttagctggtgctaaa

SEQ ID NO: 8036 - DNA, 200 bp, Lawsonia intracellularis
gaggtatacctttactggcaagaaggaatagaggtgtcaaactcctttgaaggcaaaaagcaaaaaagtagatttgttgaagaaattctttgggaagaagaacaaagcattggttcacaaataactccaggagactatatattaaatatagctaaaccagaagtttctcctccactcaggaggcgtagacatattattaa

SEQ ID NO: 8037 - DNA, 200 bp, Lawsonia intracellularis
gactcctgcaattcaacgacaattaaatagtatattgagtcatcctgtttcagctacacagttagatacttatttaatgtgtccattacgtttctattttgaaagagttgctatggttcgtccagtggaggtagtaaatgaagatgatgatccagcatctgttggccagttgttacataaagtattaaaagtatttttta

SEQ ID NO: 8038 - DNA, 200 bp, Lawsonia intracellularis
tggattatgtaggtaaagaatgtataaaggaagatttgtcaaatgaaagattacgaatgttatttaaagaagaattactatcgtctgggcttataaactctttacctcctgaaagttctatgatgcttagtcttagtggacctgaaaaattggtccgttttttatctaggcaaccagataaaacaaaaattatatatctt

SEQ ID NO: 8039 - DNA, 200 bp, Lawsonia intracellularis
gagaaatactttcaagcaactctacaaataaatggtaatactcgtgttcttgaaggaattttagatagagttgataaaaggggaaatgaaggagttattatttttgactataaaactggtcgtattaaaaataactctgataagttgtggcaggatgagagtatttggtcaaaccttgaatcttttgatttaacttcttg

SEQ ID NO: 8040 - DNA, 200 bp, Lawsonia intracellularis
tatagaacatccagaaaaagctgatgagcttctttttactctttcagaaaaaatttcaactatacagttgctttactatatatatctttatagagatgctacaggtgaagaaattcaagatgctgcatttatttctctaggggaggatggtgctgaatattggttaatgagggacttggcagcaaacataaaagaagata

SEQ ID NO: 8041 - DNA, 200 bp, Lawsonia intracellularis
ttattctgaataagattcctaagcttttaaaatttttattataccatatggagtataggttagaaatacgaccacatgaaggccgtcattgtaattggtgctcttggaataatctatgtaaggtgaacggataatacaacaaaccatataactagtgagctttttattcactttaattttgaggtttattatgtcatttc

SEQ ID NO: 8042 - DNA, 200 bp, Lawsonia intracellularis
caagtttaaaaataggtgagttatgcgccagagtccctattatacagggaggaatgggggttggaatatccctttctaaattagcatctgctgttgctaaagagggaggtattggagttgttgctagtgctatgattggtatgagagagcctgacgttgccaaaaatcctatagaagcaaacttaagagccttaagacgt

SEQ ID NO: 8043 - DNA, 200 bp, Lawsonia intracellularis
gaaatacaaaaagctaaggaggcaacaaaaggtatcattggtgttaatattatggttgcactaacaacttttgttgagatggtccgtacttctattgaggaaaaggctgatgtaattttttctggagcagggctacctttggagctcccaaagattttacttgaactctgtgaacaaaaaaaagaagaatttaaaacaaa

SEQ ID NO: 8044 - DNA, 200 bp, Lawsonia intracellularis
gctagtacctattatagcatctggaagagcagcaacacttatagcaaaaaggtggttatctcgttatggttatttcccagatgcgtttgttgtagaaggcccaaaggctggtggacacttaggttttcatgaaaaaaatctatttgatcctaactatgctttagaacaacttgtcccaggagttgttgaagcagtgaaac

SEQ ID NO: 8045 - DNA, 200 bp, Lawsonia intracellularis
cttttgaggatcaaagaggtcaagcaataccagtaattgctgcaggtggtgtttttacaggtgaagatattgctcgctacttagagcttggagcttctggcgtacaaatggggacacgttttgttgcaactcatgagtgcgatgcagatgataggtttaaacaagcttatgttcaagctaaagaagaagatgtgactatc

SEQ ID NO: 8046 - DNA, 200 bp, Lawsonia intracellularis
attaagagtcctgtaggaatgccaggtagagctttatttaacacatttattgactctatgcgtaaaggtaaaaagagacctttcaagtgtatttttaaatgtgtaaaaacttgtgagcatgaaactactccttattgtattgctacagcccttattagtgcaatgcgtggtaatcttgagcgtggctttgcatttgctgg

SEQ ID NO: 8047 - DNA, 200 bp, Lawsonia intracellularis
tgctaatgtcccacgaatagataagattatttcagtaaaagagcttataacaacattacaacaagagtttgatgcatttattcaaagtattgtcccaaaatctcaacctactgtagaataattatatagttacgttactagctagctaaaaaaggagtagagctatttctactccttatagtttattctaactaaatata

SEQ ID NO: 8048 - DNA, 200 bp, Lawsonia intracellularis
attgtagttaattttttgaagaatatataacacctgcttgtgctgctccccatagtccgcttgcatcattacagttgagccaaattggcattcgagagagtatttttttatgttctcctccaatgtttacaaattcttttttaaaggaaggatgattgactaatatttgacatttttttgctaatccaccagtgattaca

SEQ ID NO: 8049 - DNA, 200 bp, Lawsonia intracellularis
atcccttgttgggtcagactaaacaacgccaatgagcgacatattcgagcataaaagcatgaaaagtatgtatgggtttcactatcaataaactcaggttttaaggtaatttcttcaggcttaaactgttctttagttaaaaaaagatgaagccaggtaagacctgatcctgaaagaacatcatctaatcgggcataatt

SEQ ID NO: 8050 - DNA, 200 bp, Lawsonia intracellularis
aagttttttcttttgacaaaggaaatttccaaactcaagctcatggtttgttataaaaggaaaagctgaatgtccaccttctgatgctataacttttgtttttccatacatatcaagttcaagaacagccattcctagtcctgtacctgcaccaatgactcctaacctcccagacttattattaaatgaaaatacattgt

SEQ ID NO: 8051 - DNA, 200 bp, Lawsonia intracellularis
tattattgtgaaaggagttatgttttggttctggatgtaataaaacagcatctgacatactttctgtaagacaagaccaggcttgtgcttcaaagtcattgataaaaagaatatttttacagaaagataataaatctttttttataatagaatatggaagatttgaaggttttactatttcttgattatctattggacca

SEQ ID NO: 8052 - DNA, 200 bp, Lawsonia intracellularis
gcaatagctaatacacacatatctaatggtacagatgcaaataaagaattagacattatttgttgtagaatagtagtaaacgaagttgtataactagaaatatactctttatgtattaggcatagagggttatctttaaagagagcaaaacggctatatgtaccaccaatatctgcagcaaggatatgcacttctataaa

SEQ ID NO: 8053 - DNA, 200 bp, Lawsonia intracellularis
gctcctctaaaaaatatattgtatgttgaaagtacgtatataagattatttttataaaataattagtataacttaattacatattatacgctattaagcaattaccctatatctctaattaataaataatctttatatcattagagataaagaggagggtaaggtttcttgtgctaatttatcattgtaagaatagagag

SEQ ID NO: 8054 - DNA, 200 bp, Lawsonia intracellularis
aagcgacagctttttgtgaaggaggtaaatgtgctcctatcatattaccatctattgtagtattctttgcagatgaaaacataaaaggcgacgctaagaatccaattagagattcatttactgagaaatttcctattttattaatagattttttttcttgtttttttgttgtaatagtatttttttcagaaagtttattc

SEQ ID NO: 8055 - DNA, 200 bp, Lawsonia intracellularis
ttaccattttctgcattttctatagaatttttttctatttttgcttgtgcctccatttggtttgcctgagaagcaacttgcatatcctgacttgatggatttgctggtgctaaagcagcactacggattttacgtgctttttcaatagttttttcaggatttccttcttcaggagacacatttatttgtacttcacctcc

SEQ ID NO: 8056 - DNA, 200 bp, Lawsonia intracellularis
tgttgcatagcttttattatctggtccttttgtagttgtataacttgctggactggttaaatctccaccagcagtcatatgggcttgttcatgagtacgtacttcttgatcacgtttttttaattcttcaacttcttttttttgctcaggggtaagtctaagtcctgttgcatcagtatctttctcttttgaaagattat

SEQ ID NO: 8057 - DNA, 200 bp, Lawsonia intracellularis
tttgaattggagtattcgtattctcttttttgcttttttgactgtcactatgtacagaacatcctgagcatcctgagaaacttatagaagaagatgaaattccttcaatcatgtaatatccccatgtggaagtttcattgtacaatgtttatcgggagagtgttatgaaactttagggattaaaagaaaaaaatacgacg

SEQ ID NO: 8058 - DNA, 200 bp, Lawsonia intracellularis
atccggaggaggagggatcgtcgtataggaaggaggaggaggatgaggtggttagggaggtttagtctcctcaaaatagactctcactagatttattttgctgtgttgaagcattccagcggtctatgtgtagcctgtatatattaacggcactttgccgattgaactgccttgatccaaaaccaaggacttttggactc

SEQ ID NO: 8059 - DNA, 200 bp, Lawsonia intracellularis
atttgtcataataaaatacaattactatattttatatatccttttctaattttctattagattagagtccttgttaagtttctattttaataatttcactatatatatatatattataaaatggactaacacttgctaataccttaataaacaccttacctaaaaacttatatacttctttttaccactatgaagttatt

SEQ ID NO: 8060 - DNA, 200 bp, Lawsonia intracellularis
aagaaataattgctaataaactttttcttttatgcgtgtttttttgtttgatatttactttaaagcaactcgtgtgccaaaagtataatatattgataatatttattattcataaatgaaatatactaaggggagagttttgatatatataaaaaatatacataaaagaaagtgctgtatattttttatgcagtatatat

SEQ ID NO: 8061 - DNA, 200 bp, Lawsonia intracellularis
aatttttttgttaaaatatatagtatatatttatttttggataggttagtttaaaggacatgggatgggaagaaaatagcttataatttcaaataaatatataaaaatatataattatagtgtgaatagcttgccaaaaattattatctggttactttatattatatataacttcattttttctttttattacattaggt

SEQ ID NO: 8062 - DNA, 200 bp, Lawsonia intracellularis
tataatattcaatctggttttattttttactttttttaacataagattaacataagatttttattttttgattattctttatatataataatcagatataaaaaagatagataatacctttcaacataattaattagatcgtaacttattaaaaagtataatttttacaatctagtatatataaataacaggtagttaat

SEQ ID NO: 8063 - DNA, 200 bp, Lawsonia intracellularis
ttatagattaaatatattttatataaacttacaaaaattattttgataggctagacaaaagagaacttatgtataaaaaatatacattatgttaataaaaacaactatgaaagaatatcagcctaaactttcttggagaactatagggatattttttttacttatcttattagctacttttattataggaaagtcaggta

SEQ ID NO: 8064 - DNA, 200 bp, Lawsonia intracellularis
aacagtctcagaatattgttctgcagctttttttagataaaggctctactttgattaattctatagctcatttaacaaaagatgatacaataggatataataagggatttcaaatacaattggtaattgataagttagtaaggcaaaaagatgtttattttattgtagttacaactcaagaaaaaatattttttgcacat

SEQ ID NO: 8065 - DNA, 200 bp, Lawsonia intracellularis
tcttcagatagtaactttcctttaaaccgctctgaaattaacacattagtggatatggcttcagcaactgttataccaggtgatggtataatgtggaattttttacagttaaacaataataatgcttttgttgtatatagtaggtccccagggatagttagtgactctccagttaatgtaacacaaggtaattttaaaga

SEQ ID NO: 8066 - DNA, 200 bp, Lawsonia intracellularis
tggctccttcatttttattggatttaatcctgaactttttttagaggtacaagatgctgataaggaacaatctttactatctatttgtactattttatttttttgtcttcttttactattaagttttatattttttagaaactttggatatattcaaaaaacatataatgtaattaatgcattgacagaatatgttgtat

SEQ ID NO: 8067 - DNA, 200 bp, Lawsonia intracellularis
taacgtctaaagatggtcttatgttacttgactcagctggagctgttttgcaaatgaatccagctgcagctcagttttttcatataagtaaccctattatagggtcttgggtttatctcagtaataaaaaacacgatgagcttttcccacccattttttatgatgtgattaaacaggttattgaacaagggaaattagaa

SEQ ID NO: 8068 - DNA, 200 bp, Lawsonia intracellularis
gaaacagagctcttcttatctttagcaggagaagaacattatataatagttcaaggtaattctttggatacatttaagaagggtcaaccagaatatcttttatcttttagagatattacaaaaatacgactattagaaaaagatctttatcaaaaagatacgttagcatcaattggaagccttgcaagtggagtagccca

SEQ ID NO: 8069 - DNA, 200 bp, Lawsonia intracellularis
tgagataaggagtcctttaagttctataaaaggatatgtgaactatctaggtgatcgattaccctatgatagttctgatcaagaactcattaaaattattatgcaagaaatcgatcgtcttaatcgagttatttctgacttaataggactgtctgtccctacagatgtttatccagagtatattgatttacaaaaagtta

SEQ ID NO: 8070 - DNA, 200 bp, Lawsonia intracellularis
ttgaagatacgttacgtttagttaaacttgatgctaaaagacattctgtagagcttctattttatagaaatgaagagcttccttttgttcctttagatccagatcgtattcgtcaagtccttcttaatctttgtcttaatgctcttgatgctatgccagatggtggttcattaaaaataatttttgacgttaacaaaaat

SEQ ID NO: 8071 - DNA, 200 bp, Lawsonia intracellularis
acacagcagttttttcttgaagtgattgatacaggcatgggtataaatgaagaagtgttaccacgaatatttgatccatattttactacaaaattgaagggcacaggtttaggactttcaacagtccgtaagatagttgaggctcataaaggaacaatactagtttcttcagaattagggaaaggaactatttttcgttt

SEQ ID NO: 8072 - DNA, 200 bp, Lawsonia intracellularis
agtttttcctcttaaacttaatgagttatgacagttttggcagaggtactatgatgaaacctattattcttattgtagatgatgatgatgtacatcgtagtatgttgtctgcattactaaaggggtgggggtatgaaacagatgaagcaagtgatggagatattgcaattacaaaagcaaaagagcatgcatatgataca

SEQ ID NO: 8073 - DNA, 200 bp, Lawsonia intracellularis
attttatctgatttaaaaatggcaagagttgatggtataaaaatgttagaatgtattttaaattataacccatccatacctattattataatgactgcatggtcttcagtagagacggctgtgcaagcgcttcgaatgggtgcatatgattatcttacaaaaccattagactttgatgcactgaaaaaaacattacaaaa

SEQ ID NO: 8074 - DNA, 200 bp, Lawsonia intracellularis
ggcattaacacatctacaggtacatcctatagtacgggataatgaatcatttcacaaagttaatacaaaaattgaacaatctaatttaggtattttgggccgtagtccatgtatgcttgaattaatacaaatggttagcacagtagcaccatccgaagctactattttaattgttggtgaatcgggaacaggtaaagagc

SEQ ID NO: 8075 - DNA, 200 bp, Lawsonia intracellularis
ttgttgctcgagctataagacaagcaagccatcgtagtgacgcaccttttgtcacagtcaattgtgcagcattaagtccagcacttcttgagtcagagctttttggtcatgaaaagggggcattcacaggtgctgatcgacgaagagaaggtcgttttaaacaagcagatggaggaacactttttcttgatgaaattggc

SEQ ID NO: 8076 - DNA, 200 bp, Lawsonia intracellularis
gagttacctttattgcttcaagcaaaattattacgcgccatacagcaaggcgagatacagcgtgtaggaagtgatacacctataacagtaaatgtaagagttattgcagcaactaatagagatttaccagaagaagttatagcaggacgatttcgtgaagatttatattatcgtttaaatgtaatagggatagaagttcc

SEQ ID NO: 8077 - DNA, 200 bp, Lawsonia intracellularis
accactaagaaatcgtattgaggatattccactacttgctacattttttctagaaaaatttgcgctgtcaaaccgtaaggtaataaaaggatttacgcctcagagtatggatgtactcctaaggtataattggccaggtaatgtaagagagcttgagaatgcaatagagagagctgttattttaactacaggagactata

SEQ ID NO: 8078 - DNA, 200 bp, Lawsonia intracellularis
tatcagaacgagaattacctatggttatgacttctccttcacaacctaatgtactttctagtcaatcagataaagaaatagtccaatataaagatactgttaaacatttaagtcaagagcaaaccttaacacttgaagagcttgaaaaaagagctattataaatatgcttcatgaaacatctgagaataaaagtgaagca

SEQ ID NO: 8079 - DNA, 200 bp, Lawsonia intracellularis
gcacgtagacttggcatcacaagagcgacattacacaataaacttaaacgatatggaatagaataatacttgacagtgatattatcaaaccctaatttattgttgtcttattataagttataatccagtttattatttatttagttatttattgtgacttattcaaaaaataagttgtcttaaaaaatagggagaaatat

SEQ ID NO: 8080 - DNA, 200 bp, Lawsonia intracellularis
gtcagaggttctgtatgagttttatacaggtttaacaatgacacagggtaatgattcagctttaagtagtaaatcaccattgaaggctttttcaaatcagactattgattgggacttatctcctgaaaaggcagtaaccttacatctagagtatggcaacaataattggcatgtcatacatacagggggttgttctggtc

SEQ ID NO: 8081 - DNA, 200 bp, Lawsonia intracellularis
atgattcttctgtttattttatagttgatacatatagtgatcctatacaagtacgccttattcgaaggaattttgaaatggcagaacaccttattagtataccattaccggatacgttagttaaactttttcaaaaagagtatggaaatattcgtggtgtatttgaacctctccctgagattaaggaatggctacgtaca

SEQ ID NO: 8082 - DNA, 200 bp, Lawsonia intracellularis
gagcttggccaatagtatttaagtagtccagttgtataatattattagttatagagccaacaagaaacattatgattattgccaatatatgtagagggaggttttattatacaacgttcatgtgctagtgggcaacgaggtctaaagttgcaacctatggggagttttcctaaagctggaaccgtcccaggtatagattc

SEQ ID NO: 8083 - DNA, 200 bp, Lawsonia intracellularis
tagacgtaatttgcccttttttaataagggaatagcattcattaaagcttgtgtatatgggtgtgcaggctttttgaataaatcatatacagatgcgttttctataacttctcctgcatacataacacatacttcgtctgccatttcagctactactcctaaattatgagttataagtagcatactcatttgatgttttt

SEQ ID NO: 8084 - DNA, 200 bp, Lawsonia intracellularis
caataagctgtctaagtagcacaagaagttgtctttgaatcgttacatctaaggctgtagttggttcatcagcaataagtagactgggtgaacaactaagagccatagcaatcattatacgctgtcgtatgcctcctgataattgatgtggatagtccaaaatacgtttttccggagatgaaataccaacaattttaagt

SEQ ID NO: 8085 - DNA, 200 bp, Lawsonia intracellularis
agctctatagctttatgaagagcgtctttctttgagaagtgaagatgttgaataagtggttctgctatttgatctcctacacggatgacagggttgagagatgtcattggttcttgaaaaatcattccaatatctttacctcttttttcccttatttctgcttctgaaagctgagtaagttctttgttgttaaataaaat

SEQ ID NO: 8086 - DNA, 200 bp, Lawsonia intracellularis
ttgtccagatataatacgtccatattcaggaagaagttttagcaaggctaatgctgtcatagtcttcccacacccagactctccaactaggcataacgttttccctttattaagacaaaattggatatgttggagaattgttataggggtatccagattaaactgtactgagagatcagttacttgaagaaggtattctg

SEQ ID NO: 8087 - DNA, 200 bp, Lawsonia intracellularis
tttgtttaactaagtattgttgctgcatagagttactcaatagtgaaatataatgtttgttatatataatataatggttagataacgtataataaaagatatataaagtaacttattataaagggatacaaaattctattgacaatcattatcaaaaagttcaaaatattattattctagagaggtaatacattatgata

SEQ ID NO: 8088 - DNA, 200 bp, Lawsonia intracellularis
ggttgggattcagtccttacaggtggaattattatatatactattatttttgtaactattaagctttttcggttaaagcaatcatgtaatcccacaaaaaaaaatagttgtacagggtgtacttcaaatcataactgttgttctatagagcatagtctaaaataacataaaacttggagttacggaacataggtaaaagt

SEQ ID NO: 8089 - DNA, 200 bp, Lawsonia intracellularis
taatgatattgaattaacccattatgttttttgtaatataattatatagttattttttatgatggctcctttagataaaggatgatttttgtctataaaaagtttaattattatagataaatatagatagtttgtaaaaattgggaggagatatgtctgcagttgttgatagtatgacaccatttccttgttcagaacat

SEQ ID NO: 8090 - DNA, 200 bp, Lawsonia intracellularis
gatgagcttccagttataaatgaagcaacagcatgctgtgtctttgataaggtagagagttatatttcattgcgtgatttaaaagtaggacaacatgctcgtgttgtacgtgtgcaagcagatggagagctaggaagacgtatccgtgatatgggtcttgtcccagggacagaggtaactattgttgggagggcacctct

SEQ ID NO: 8091 - DNA, 200 bp, Lawsonia intracellularis
taaagatccagttgcattaaggttactaggttttactcttagtcttagaaatagtgaagcagactatgtgatggtatcacctatttcataaataatatgagtaagtattaaagtaaaaatataccattaatttgtatataaaatggttaaagtaacctttagtattatatagttgtttttccccttccatttgatatatt

SEQ ID NO: 8092 - DNA, 200 bp, Lawsonia intracellularis
accaagttaagtgagattatggttattttacaaaaacaaacatttgctttagccggtaatcccaattcaggtaagtcaacgctttttaatactattacaggttctcatcagcatgtgggaaactatccaggtattacagttgaacagaaagaaggctttttacatacagatactgatgaaattttgcgtataattgatct

SEQ ID NO: 8093 - DNA, 200 bp, Lawsonia intracellularis
tcctggaacatactctttaacagcatacacagaagaagaaaaagtagctcggatggtccttctcaatgaacatccagatgttgtgattaatgttttaaatgctaatgcattagaaaggaatttatatttaactgtacaacttcttgaaatgggtatgcctcttgtccttgccctcaatatgatggacgaagttgagtcac

SEQ ID NO: 8094 - DNA, 200 bp, Lawsonia intracellularis
atggtttaagtattaacatcaagaagctttcttctaagatgggtttacctgttgtcccaacagttgcccgaacaggaaaaggttgtaaaagattaatactagaagcatgtcacttagcagatgcacgaagaggtgtggaaaaaaaacctttactaatttcttatggtccagatcttgatcctgtaattaagtttatggaa

SEQ ID NO: 8095 - DNA, 200 bp, Lawsonia intracellularis
gaaaaaattcaagaggcagaatttacaatcaagaatactcctgcacgctggattgcactaaaatttttggagatggatgaggaattaatagaaaaaactcgtcagttaaatcttaatttatcaaaacaacttgaagaaaaagttgcagaagtaactgctcatttacatgcaacttttgatacatgtcctgaggctgtaat

SEQ ID NO: 8096 - DNA, 200 bp, Lawsonia intracellularis
agctgattataggtatggatatatttctgctgttctgagagaaggagttcttacacagcaggatcctgtgcgttatagaattaaattgtcagataagctagacactgttcttacacataagttttttggtccagtattcatgttttttatactttatgctatttatcatttcacatttacattaggggcaatccctatgg

SEQ ID NO: 8097 - DNA, 200 bp, Lawsonia intracellularis
gttgggtagcatctcttttttcatttcttagaacacaggcaggacttttactgccttcaggacttttaaaatctttagtcatttctggtattattgatggtgtgggaggagttatgagctttatcccactaattttattaatttttttacagattgctgtacttgaagattctggatatatggctcggatggcatatatg

SEQ ID NO: 8098 - DNA, 200 bp, Lawsonia intracellularis
ttagaccgagtatttcgtttttttgggcttcacggatgttcagttgttccgtttatcattggggggggtattgcaggaggatgtgcagttcctggtgtactcgcagctaggacattacgtagtcctcgtgaaaaactagctacattactagttatcccatttatgagttgtggagcaaaattaccagtatttattctctt

SEQ ID NO: 8099 - DNA, 200 bp, Lawsonia intracellularis
tgctggtgtatttttcccaggtcatgaagcaagtattatgtttgggttaactcttgccggttgggggatagcactattaacagctaaactttttcgttcaacaattattagaggtccttcaactccttttgttatggagttgccgccttatagattacctcttttaaaaggactgtttattcatacgtatgaacgtactt

SEQ ID NO: 8100 - DNA, 200 bp, Lawsonia intracellularis
ggagttatctgaagaaagcaggaacaactattcttcttatatcaattttgttttgggcagcaatgacatatccagaactttcaaaagataggttagcaatatattcaaaaaaggaggaagtgattcaaacagaaattaagcttacccaagctaaaggtggtgatatatctagccttcaagactcactccaagatgtaaaa

SEQ ID NO: 8101 - DNA, 200 bp, Lawsonia intracellularis
aagcaggttggagaagaatcgttacgtaattctctagcaggaagagttggtttgtttcttgaacctataacagaaattgcaggatttaattggcagatggatattgctttgctaggtggctttgtagctaaagaaattattattgctacattaggtacagcatactcattaggagatgtagatcctcaagatgcaaaacc

SEQ ID NO: 8102 - DNA, 200 bp, Lawsonia intracellularis
gcttgcagaacaactacatcaagataaaagttggacattggcttcggctttagccttacttgtttttgtattattatatgcaccatgtcttgtgacgcttgtaactattcgtcaagaaacaggttcatggggatggcctatatttagtatgatttttaatacactattagcatttatattagcagtcattgttagatacg

SEQ ID NO: 8103 - DNA, 200 bp, Lawsonia intracellularis
tatccttgctatttttatgacctttattgtggagtttgtttgagaattctatgtaataaggttagtggatgaagagcttctactcctgtatgatggtacatttgtagtctacatgttccacactctgaaagtgtaaataatgcaccactttttttaattatatcaaataaattgttaccgatagatgtagcaatatcata

SEQ ID NO: 8104 - DNA, 200 bp, Lawsonia intracellularis
tttatcttttttaaatccataactgccagaaattccacagcagccagcttctgcatcttcaatattagctcctggtaacctttgaagaagttcaaagcctggtttaccaattccttgagcttttagatggcaagctgtatgataaagaagcttagtcgaatggagtgttacattaatttgtaactctttagattctataa

SEQ ID NO: 8105 - DNA, 200 bp, Lawsonia intracellularis
gttttataataaactcacatgcatcttcaatattcctagaaaatgaagtaacttgatctatcatctctgggaaaagttctgcatattcttgtttaagagtaagggcacaactaggacacattgtgacaattggtatgttttgttctgcatactgttggagtatcttactattatggtgagctacttttttcccttcacta

SEQ ID NO: 8106 - DNA, 200 bp, Lawsonia intracellularis
taatagccattagaaataagtggtagattacaacatctaacttttggtaatataacttcgtagtttgctttttccattatagcaacaaagtccataccagtttgtggttcatagtaattaatataacagccagggaaaaatacaactttttttgtataatgacccttctgtttttttttatatttgctatataattttgg

SEQ ID NO: 8107 - DNA, 200 bp, Lawsonia intracellularis
gaaatatgtaggtgcgaaaaaagggatagaggcacgtcgatcaattccaattttatcaagtaaccaacgagtaataggacttttcattccaataagttgtaattgataaggtatccactttataagttttgctaaaaacggagcatgcgcaagaagccagtctctaaagggaggacgtcttgttctgtaatattcggcac

SEQ ID NO: 8108 - DNA, 200 bp, Lawsonia intracellularis
gagctaacatatttagagaagagatttttacatttgaagggcagcttatatcacaacatttacaattagaacaataagatagtccttctatctctttttgttgtttgagtctaaatcgttcagctgatggtcctgtgagttttggacctttaaatttttttgtagctgctattacaggacaattgatagtacatatagag

SEQ ID NO: 8109 - DNA, 200 bp, Lawsonia intracellularis
caagttatacaactatcaatagattcaagaggattcataacatttacctttatacatttagagaagcaaagtatgctgtagatattgctacaccattcccagacttttcataggcagagtcatatccattaagtgtatttccaataaaaaagacattatcacaaataggatttccatcagagtcagttggacgaaggaag

SEQ ID NO: 8110 - DNA, 200 bp, Lawsonia intracellularis
gaatcaacagttggtccaatcatactaaataaatgtgatttttttattttaggataaagttctttatttgcccagtctggtgatgagggattagctggaagatcaatgttaaagataggttcccaagcacgattatgctttgtaagaataccattacttattatccctcctgtagcaataataaagtgagttgcttcata

SEQ ID NO: 8111 - DNA, 200 bp, Lawsonia intracellularis
tttacgaatgttgctattttgagttgttattacagaaatacagtggttatcctttacttctgcacttgtaacagcagcattatcaataattgttacatgatattttttaagtatataacgcaatagtatgtttagtcgataacctgtaatggtaggaggtaaaacatcacattctcgaataagacagttacttttttgtt

SEQ ID NO: 8112 - DNA, 200 bp, Lawsonia intracellularis
caagtttatgaagtaaatgtggtaagaaagttgttccaagaataggaggaagaattataaggtctgactgatttccttgttgctttattccttgaacaagccattttaatccattttctgtttctaaatattgtgcaacattgaaagtagatatatttctctctgattctggaaaatgaagttttgcttgtgtaaatgtt

SEQ ID NO: 8113 - DNA, 200 bp, Lawsonia intracellularis
ttgttagcaaaatattttttagaggataaccctttgatgatcaactcagggtaaaagtctttcattccttctattcccagtatacaaatattttttatatcaggtatgattgacatatccatagattctgtaaccatccatgttggctttattgtgccagcagctgtgactacataagtatttttttgactccttgtttt

SEQ ID NO: 8114 - DNA, 200 bp, Lawsonia intracellularis
atatataacattttcttctcccactaactcactaaaattttttaatgcatttcttacagtcaattctcctattagttgatatggatgtcttttaggtaggaatgtaactgcttcaaaaggattactgactggcttaccattaggaaggtatccaagaacatcaattgttccactacctattgtgatagttccatttcctt

SEQ ID NO: 8115 - DNA, 200 bp, Lawsonia intracellularis
ttgtgataagaatacattttttgcctttccgtgcagcaaaagcagcagcagtcataccagaaagtccaccacctactacaataagatcgacttttctattcatgattttcctgctcaatatttagagtagcactatagatttgtctaaatagttcaacttcacgtaaggactctccccataaagatggataaatgccaac

SEQ ID NO: 8116 - DNA, 200 bp, Lawsonia intracellularis
ccattttttttgttggaaagtttgtagtaaatcagtgattggttctttgctagagagtaagttaaattgtagaaagtttcctatagcacgtagagcacaaaaagttccttgacatgttcccatccccattcgtgttctgcgagagatatctcctagtagataagatgagggctggctagcaatgtattcaacctcagcaa

SEQ ID NO: 8117 - DNA, 200 bp, Lawsonia intracellularis
aagtaaccatttcacattcacatattagatctttttttagtagattattttttatagcagtagagacttcatttatagagttacctaagcgggagagtgctggttcaaaaccttgtataggaaaatattttatttttttatgtaatgtaggatctacttctgttataagtggttcttttgctgtattacatggaacatta

SEQ ID NO: 8118 - DNA, 200 bp, Lawsonia intracellularis
ttgttgaagtagttgcatactacattagagatttgttcagccattaagcgatatgttgtaactttaccaccacatatgcttgccatgccagatagcccttcatttttatgatcgattatacgaaaacttcttgaggcatagagttctttaggtgatttatacatactatataatggccgtgtccctgcaaaagatcgtaa

SEQ ID NO: 8119 - DNA, 200 bp, Lawsonia intracellularis
tattctgtattgatgaattttagggaataatacactgcctatatttaataattctaggatatcagactgctcagggattatatcatctggtctattggtgtttttagatgttgttccaagaattgttgtagattcatgaggtacaaaaatatcaccatcagaaggtggatgaagcctattgataatttttttagaaagtc

SEQ ID NO: 8120 - DNA, 200 bp, Lawsonia intracellularis
gatgattaaagacaataagtgcacctttatttggagttaagtgaagttcaattcctgcttttgcagcgacatcaccacaccagctccctgcagcattgataacaaagttacaagtaagatgtgttatttcttttgtccaaaagtcttctatagtaacacctgtaacaacaccattactgtttgtaattgaagtaacttta

SEQ ID NO: 8121 - DNA, 200 bp, Lawsonia intracellularis
gtataagtacgaaattctcctccatatttttgggctgagattacattatgccatactaacttaaatccatctatacttgcatcaggaactttataagcagacagaatatgttttgagagagtaggtgcttcttttagtgcatcagtaatggaaataggtgtggttttgattttacaattgttacaagctgtaacccagtt

SEQ ID NO: 8122 - DNA, 200 bp, Lawsonia intracellularis
tttttcaaattcaggatcatcttcattagttctgataaaaagaccaccgatattttctatacaaggcttacatattttagataatattatattttcttttgcacagtcagtagcaacaccttgatctttcattacatatcgtgctccactatggagtaacccatggaaacgtgaagtggttccataagcaagatcttgtt

SEQ ID NO: 8123 - DNA, 200 bp, Lawsonia intracellularis
gttcaagtaatagagttttaagtccacgcattgagagatctcgaagtgtacctacgcctgtagctcctcccccaataacaattacatcccagtgttgatttttgtaaaatgataaagccttcatcattcaacctttcccctgaaatagtatagttatatgatggagataaaagacaacatgtggaataagatgaatctaa

SEQ ID NO: 8124 - DNA, 200 bp, Lawsonia intracellularis
caagagtatttttaatatgcaatataaaatgccaattatactagtaagatatctatttaaagtatttactactactaaataataagaattaggaggttaatatatatatatatggttgtgactagctagaagttataactaataaactctataatttattttttattccttatagcctatattagtgttagttctctagt

SEQ ID NO: 8125 - DNA, 200 bp, Lawsonia intracellularis
tagaagaataactagatagtatttatttataaagtagtgtaatgataattggtacacatattgtaagaacagcacctgaaaatatagctaaaatagtgttcagttctccagaggtacgagcaattataggtatacatagttcacttgatgctgctgctacagaaagaggaccaagtccgccaaccaaacgtacaaataga

SEQ ID NO: 8126 - DNA, 200 bp, Lawsonia intracellularis
ggagcaaaggtcattgctataatttctcttgctatatttacaagaagggttaatgcaccaaggtcaggtgtagtaaattgagttacaagcatactagagagactatagtagccaaggccagatgcgacagctattacgtctctaaggaatatattttgaagaataagccatgaaattacggctccaagtaatgttcctat

SEQ ID NO: 8127 - DNA, 200 bp, Lawsonia intracellularis
aagaattcctaatggaactaaaagtatttttccttttaatgatcggataacttgccaggcttgagagttaattcctatagtcatgccaacagtaaaaagcataaagtagacaatacaggtggctaagccttcatatataagctcttttgggactaactcaatatgaccaataataatacctagtaaaaaacaagctagaa

SEQ ID NO: 8128 - DNA, 200 bp, Lawsonia intracellularis
caataaaggattctctcattttaagtgttcctttaagtgttcctgaatattttctggaattatatggacaaatcgagataataattttgctgcaatgaggcttccagcaatacaaaaaaaagtaataattattgcttgaatccctaatgtatcaagttgttgaataatagtagtatttgatcctaaagaaagtcctaata

SEQ ID NO: 8129 - DNA, 200 bp, Lawsonia intracellularis
aaaaaagtaagatccttactgaccaaattagactgtaatctactgtttttattaatcgaggatgatttcgtattaaaaaaccaataggagccccaagagaaatacagacaatttctgcaaccataagttatattatccttatattataaataatatatctatcaattattacttactatataactattaagaaccattaa

SEQ ID NO: 8130 - DNA, 200 bp, Lawsonia intracellularis
tatatactttttataacatatggcttgagacactaatctaggctatagatatgatcaatagatatcttttggtttagcaagtaaaaatatagtttgttgaccagttgtttctcttattatatttgaaaatctgtagctggccatatactttatttagtagttatatataaagctgccattagttttatataccgttaact

SEQ ID NO: 8131 - DNA, 200 bp, Lawsonia intracellularis
tatcgtagtatgtagagaaacagggagtaactatggaacaagttatggcattagaacaaacatggactcttcatcgacctgaggattttaaagttcgttggaaagaatttgttttagaatactttaaagtaggtgaatataaaaatcctccctattggcttaatttttggccttcaaattattttttgatagagtggtta

SEQ ID NO: 8132 - DNA, 200 bp, Lawsonia intracellularis
tttcatcataaggaagatattgcaggtgaactatgtatagatcttggttgtggtttgggtttttcagcggtaattggtcaatggttaggggcaaaggttataggggtagagtatgtatttgaagcactgacatatgcaaagtataatgcagcttctaataatatatcacagccatattggataaatatggattgggataa

SEQ ID NO: 8133 - DNA, 200 bp, Lawsonia intracellularis
acctgcgatagttaaaaattctattccatatatttggtgtagtgatattatttatgatacaaatgatgctgagcccattatttgtttttttgataacatgcttaaagaagacggcataatttggatttcagaacctaaacgacctgcatatgatgtagttcttaataaactagaaaaaagaggatggaattgtaaatgta

SEQ ID NO: 8134 - DNA, 200 bp, Lawsonia intracellularis
tgtttgaaagcgaaattcctcattgtcgtcctttgcctaaatttaaacgaatttatactcgtatgtgggaaatttctcgtggttagtttcctcatttttacttagttagatgaatatggatttttttggttaaatacaaggaaaagatatgggagaaactgttcgttttggtgtttcgttagacgaagatttacttaata

SEQ ID NO: 8135 - DNA, 200 bp, Lawsonia intracellularis
aatttgataagctttgtgatcggcaaggttaccctagtcgttcagaagcattacgagatatgattcgacaggcattagcaaaggatatactacaatctaaggatagtaatgcagcaggtgtcctttcgttagtatatgatcatcatacacgtgagctatctcgaaagttgatagagagacagcatgaaatgtacgattct

SEQ ID NO: 8136 - DNA, 200 bp, Lawsonia intracellularis
attattgctacattacatattcatttagatcgttataattgtttggaggtattaataatcaaaggtaatggaggtaaaattcaacaacttgcagatatgctttgctctattagaggggttaagttaggggccttttcttttcttccagttgaagaagatgttttttaatatttttaggattattgtagcttatgaaagat

SEQ ID NO: 8137 - DNA, 200 bp, Lawsonia intracellularis
attcaaagtactcctgcacagattgcatttcctattgatcgtgttggggtaaaaggtcttaagtttcctattcagattcaaacgcgtgatattggaatgcaacatactgttgctatagtggatatgggagttgatctatcagtatcatcacgtgggactcatatgagtcgttttgttgaagtattacaggattggaatga

SEQ ID NO: 8138 - DNA, 200 bp, Lawsonia intracellularis
accactatgttgtgagtcattagagaggcttgtcaaacaaacacaaaaaaaattacagtcacagcatgcttatattgcattttttttcccttactttttgcataaaagagctccaagtacaaatatgttaagtttattttcttatgactgtaaactttcagcaaaatctattaactataatatagaatttatacttgagt

SEQ ID NO: 8139 - DNA, 200 bp, Lawsonia intracellularis
taactgttcctgttatgacagtttgtccttgctctaaagctattagccacgagggtgcgcatagtcaacgttcagagatatatattcaattaagattagaacagtttagatttattgaagactttattgtattagcagagtcatcagcttcttcgcctttatattctttactgaaaagagcagatgaaaaatatgttact

SEQ ID NO: 8140 - DNA, 200 bp, Lawsonia intracellularis
gaagatgcatttgctcaccctaagtttgttgaggatgtcgtcagaaatatatcaagcaagttaattacagtaacagatgttcttggttttcgtgtcgaagttgaaagctttgagtctatccatgcacataatgcttttgcttatattgaacatgagtttatttgttagttatataagaagggcttgagattaaactaaaa

SEQ ID NO: 8141 - DNA, 200 bp, Lawsonia intracellularis
aattaataagagacaaataaaataattcaaatactttttttgatgtaacttgttatatttaaagtaaatttttgtaaattcttctctgtcagactcttgacaccttcactggatatggcaaacagtaaataggggaaagtatcagtagggggaaagatggagattgtaagcaacggaattattggagagagtaccacttt

SEQ ID NO: 8142 - DNA, 200 bp, Lawsonia intracellularis
aaaagaggtctttcatgtcctgcataaagttgcacctactgatagcactgtacttgtaactggagagtctggaacaggtaaagagcttcttgttcgtgcactacatgctcaaagtttacgggtaacaaaaccatttgttcctattaattgtggcgcaattcctaaagagttattagaatcagagctttttggccatgaga

SEQ ID NO: 8143 - DNA, 200 bp, Lawsonia intracellularis
agggggcatttacacatgctgttcgttcaagagcaggaagatttgaagttgcagatggaggaactgtttttcttgatgaaataggagaaatggatcttagtttgcaagtaaaaattcttcgtgttttacaggaaaaagagatcgaacgtgttggaggtacaggaccacgtaaagtagacgtacgaattgttgctgcaaca

SEQ ID NO: 8144 - DNA, 200 bp, Lawsonia intracellularis
aataggaatcttgaacaagaagtagagcaaggacggtttcgtgaggatttatattatcgtctaaatgtgataccacttcacctaccaccactaagggaaagaggacgtgatattttattactcacagaaagttttcttactcgtttttgtgctagaaaacaacgtcctattttaaaaattgatccagaagtatctaaagt

SEQ ID NO: 8145 - DNA, 200 bp, Lawsonia intracellularis
ttttttagcttatcattggcctggtaatgttcgagagcttgaaaatgttatagaacgattaagtatcttagtagatggaaacattgttcgacttcatgatcttcccagaaagatcattgattcagttggtacattagaagatttaactaatatagaacttccaaaaagtgttgagtccattcctacctctatttctccac

SEQ ID NO: 8146 - DNA, 200 bp, Lawsonia intracellularis
aagaatttatttggcctaggctagaagatatgcgtactagaggagtgggattaaaagagtttttagaacaaattgaagatcgactattgggagaagccttattattatctgatggagtaaaaaatcaagcagcagaaattttgggtataaagcggacaacacttattgaaaagttgaaaaaacgtcgacttgatggagaa

SEQ ID NO: 8147 - DNA, 200 bp, Lawsonia intracellularis
gtgtgaatcaataaatgtgttataatttaatataacgatacttttttaccaggtatggttttgtgaagttttttatttactcatggttgttccaattttttttgattactggaggaatgatcttatttactgtggaatatgtagaggcagtttcatggaaatggtctatgctcccagggagagaaagaataataatttca

SEQ ID NO: 8148 - DNA, 200 bp, Lawsonia intracellularis
tatgatacacctaatcaaggtaaaaaagcttctcgtattagtacaacccaattagaaattcctctttcaacacctgcaaaagatctttcacgtattggagcttctccttccccagaaagtttagtatcagatttatcgttagatggctcaaagctccatataaatttaagagatgcagcatttggctatattacaacctc

SEQ ID NO: 8149 - DNA, 200 bp, Lawsonia intracellularis
tacaaatcctaatcagttaattattgatgttttttcagatcctctaggaaatcgttggcgtaaccttggtgtaccagctcctgcatctgctccttctagagcatcatcagcattacctgaagttcctaaaaatatttctaaacagataaaagtatccaataatggacaacggttgaataaagatcaggaaaagacgtcat

SEQ ID NO: 8150 - DNA, 200 bp, Lawsonia intracellularis
taagtcaagagcaaaaacaagtagcaaaagcacctgctgaatcgataacttcggagggtaaagctgaaaagaagcaatctattaaagctgatacttctaaggataacgtaaaaaaatctcaggacgtaaaagggactttaccagtagatacaaaagataagcagcaagtaagtaaaaaggaaaatcaggaggctataagt

SEQ ID NO: 8151 - DNA, 200 bp, Lawsonia intracellularis
aaagaagaaaaaattgaaactgtcccaacagttcctcctccttctgttgatgaacttactatgcttacagctaaagtagaaaaatcacaattagcatcagatgagtatagttggtcaaaaaaggcaaaaagtccagctcaggaagataatacagaggagaaattagaaaaaagccagaataataacaatcaaaaagttaa

SEQ ID NO: 8152 - DNA, 200 bp, Lawsonia intracellularis
tatactagaaaattcttcttctagcacagagggtactgtacaatcaaagcttactgaaacacctattgttgaagcaccaatagaagagactgtaaatagcattcattcaaaattaaatttcaaaggaccagatgcttggcctaaagaaaaagctttaagtacattggataagttagaagaggtactaaataaaaataagc

SEQ ID NO: 8153 - DNA, 200 bp, Lawsonia intracellularis
ttatgcagcagcctgaaactcgcgatagtcttcaacctttatcaaaaactaatgaagagaaaccagtttcagagccagtggttgtatatgttgatgaaaaaggtaaccctgttgggaaaccacctgatacaaccgctattattgaagaagcaaaaaaaaatatgagagcaggacaagtgcaaaaagctaaagatttacta

SEQ ID NO: 8154 - DNA, 200 bp, Lawsonia intracellularis
gctactttaaaaggccatgcactagtccaagaacagcatgaagaggtattatatctatttagtgaacttaatgaaaaaatttataaagataggtggattgaagggtatgaacctatcataaccagtactaataaagctatgaattttaatctaagatctccaagagtagctgaagcccttatgcgtcttggaatggttaa

SEQ ID NO: 8155 - DNA, 200 bp, Lawsonia intracellularis
tcttagaataggaaatcaagatgaagctgctggttattttggagcattacgaagaaaatttcctcagagtgaatttataccagaagcctatttagcattaggaaaagatcaattttcaaagggagagtatgcagatgctgtaaaaactttccaacttattttagataattatccagaaagtaaagcagttcaagatgcat

SEQ ID NO: 8156 - DNA, 200 bp, Lawsonia intracellularis
cacgctttatggctgaagctctttttaaacaaggacattatagccgagctcttattcttgtagattttgtagatagacgatggcctcgattatatcttgaagatccaaattatttaaaaatggttggagatctttattctagagaaaatcgtttagatgatgctcttaaagcttattggacatactataatttagttcca

SEQ ID NO: 8157 - DNA, 200 bp, Lawsonia intracellularis
gaagcaaaagatagccatgatacattgtttaaaattggtaccagttattttaaaaagggattaatgcagggtggtaaagacgtttttgaagagttattaaagaagtttcctaaatctgactcagcgccaaaggccttacttgctctgggcgaagagcaagtaattaaagaaaatccaacaatacaagaattagttactat

SEQ ID NO: 8158 - DNA, 200 bp, Lawsonia intracellularis
ttttgaaaatcctagttctactatccctgaaatttactataagaagattcttgatgaatatcctaatagcccagaagcacaacaagcagcaatccgtttagctgcatggaaactttggcatagagacattcctacagctatgacaatggctcaacagtttttggataaatatcctgaatctccctatgctccaagagcag

SEQ ID NO: 8159 - DNA, 200 bp, Lawsonia intracellularis
aggaaattattgcacgaggttttgaccagtcttttgcattagcactacaagaagagaattatgaacggattctttccttatgggaaaaatatccttatttgcagatagcgtataaagatatgactgacgagttacgtgtagctttagccagggcatatttaaatagaggtgatgaagagaagggtatggatctacttaat

SEQ ID NO: 8160 - DNA, 200 bp, Lawsonia intracellularis
cagtttttagagtcaccacaagatccaaattatggtgattatgtttataacctttatcttgctcattatttaagaaaagaagactggactaacattttgaaacttggtgaaaaagtttctagttggaagtttcctgtatctgcacgtgctcaattagattatgcactagctattgcttcagaaaatcttgggttagggaa

SEQ ID NO: 8161 - DNA, 200 bp, Lawsonia intracellularis
taaagccttacctctttgggagaggctatatcaacgtgaagatattcctttataccaaaaagcttatgcaaattattttatggcaagggatgctgagcgacgtagagatttgaatgcagcatataagttaaacctaaatacattaaaactatttgttacattacaggaagagcgctcagataaagcagatcctgaacgtg

SEQ ID NO: 8162 - DNA, 200 bp, Lawsonia intracellularis
tacgtgaatctcttgcagcacttatggatgttactgaagttgccaaccgttttgttgaatctttagaatgggcagatcaatatgcagcatttgttccagaaacttctcctgattatgcaggactattatttcgtaaagcacgactttatagaaagatgggagatttgagtaagtggaaacaattattagatgaaattgtt

SEQ ID NO: 8163 - DNA, 200 bp, Lawsonia intracellularis
cgtcgtgagccagaaagtgtatttgggcgaatggctgcatcagagctacgaacatatgaagtttcaagagatctttctcgttttacacaataaaatgccacaaggtaataattagaaatattatgcgttattagaatgctcttgtctaagtttgctttctagtgctcctgtgagatatgcatttaataaaggtacagtaa

SEQ ID NO: 8164 - DNA, 200 bp, Lawsonia intracellularis
atgtactatcataacgttctttatcattggcaagtagttgtgcagctgctttaggtggtattgcttgtgcatatggtcgattacttatcattgctgcaaaagagtctgccacagcacaaagtttaccaaatttacttaaatgtgtttctttaagtttgtttggatatcctgatccatcaagacgttcttgatgttccata

SEQ ID NO: 8165 - DNA, 200 bp, Lawsonia intracellularis
actgcttgagttatttcattaaatccaagattcaacttttggagaatttttacaccagcaagtgtatgtagtaaaattttttctttttcttcacttttaaggggtgtagctttttcaagaataaaagaaggtattttactcattcctatgtcatgtaaaataagtcccaatgctgatcgatcccattctcttcgtatgag

SEQ ID NO: 8166 - DNA, 200 bp, Lawsonia intracellularis
tttatcttcatgtgtagtctgtagaagccacagacctataaataatgtattaagagagtggtgagaaagagtatgttctgtataaagccgacgcataaagagtttaattctgtgtttatcttgccaaaggaattcagtaaataccattaaatcgttatagagtttttcaaaaacaggtaatactggctgcccaataaagt

SEQ ID NO: 8167 - DNA, 200 bp, Lawsonia intracellularis
ctaatagtcgcatatctaatgctcttataaagatatcagctgcctctgcttccttaagatttgagtctagtaagacaagatcaacctgttttacaatatgttcagagtaaatagggtgatctgtacgagaaacaaaaagtcgtccttcattacaaagtatttgaatttcttctatttgttcatttgttagacgacatcct

SEQ ID NO: 8168 - DNA, 200 bp, Lawsonia intracellularis
ttacgactgtatggatagagttttaggatatcttcacgaaactggaagagatctactggtggacgatatttaggaaaactagaaagaatttcatgagatatttgataatactcttcagcaatattttctgggacagttgctttagactgtctactgcttaccataggttatttcctgaaaatttttataaagtttgtacc

SEQ ID NO: 8169 - DNA, 200 bp, Lawsonia intracellularis
tcttggttgaactgtatgtggagcagattgtccagctgtaataataatatcttctcctatggcaaaggtagggttttgcatgataaaattttcagtcctaaggagatctccctcagaagatgccgatagatattgggggagtacaccccaagaaaaattaagtcctttaagtgaagttcttgatggtgtaagggcataaa

SEQ ID NO: 8170 - DNA, 200 bp, Lawsonia intracellularis
taggctgagatggtctacatgtagatacatgtctagctgctgttcctgtcattgtatgtgtaacaatagcttttgctaacgatttttcagcaagaagacatgcggcatatgctaaaaattcttctgcacttttttctgcttcaggttcttttagatgacgtgtttctatcataagctcttctgcttttgtcgtaatatct

SEQ ID NO: 8171 - DNA, 200 bp, Lawsonia intracellularis
ctcataaagcctactgtttctactggatgattacccatagctgtttcttcagaaagcataacacaatcagcaccatcaagaacagcatttgcaacatcggttatttctgcccttgttggtgtagggtttgataccatggaaagaagcatttgggtagctacaataacaggttttgatgctttattgcaagcacggataat

SEQ ID NO: 8172 - DNA, 200 bp, Lawsonia intracellularis
acgtttttgaattgctgggagttctggtaaaggacattcaatacctaaatcccctcgagcaaccatgataatatcgacttctttaagaatttcttcaagatgttcaatagcattacgacgttcaagttttgctattacaggtatatcatatccattggctttaataatacgttttgcttcaataatatcttcagcagatt

SEQ ID NO: 8173 - DNA, 200 bp, Lawsonia intracellularis
gaacaaatgaaatggcaacagcatctactccaagcttaagaccatcagaaagatctttttggtctttttctgtaattgctggaacttttattgactttcctggaagagctaaaccttttcgtgaagtaataataccatcttcttgtgcaataagaaggaatgttccattggaattttgttctttaacttgaaattgaagt

SEQ ID NO: 8174 - DNA, 200 bp, Lawsonia intracellularis
gttccatccgcaagtatgagtatatcattaacaactaggtcgcttaggattgctttatgatcaaagggaatatagggataatcatttgttcttttatcttctggaccaagacataacacatcacctttagatacgtttaatgcaacatcaccagggagtgcacctatacgtattttaggtcctgataagtcttgcataat

SEQ ID NO: 8175 - DNA, 200 bp, Lawsonia intracellularis
tgtaattggtatttgatgaatatgttctaactctctaattgttgaaataagttctataaaggcagaactatctccgtgtgagaagttaaggcgaaaaatactcactccagcttgaataagttgagagagagtttcctttgaattagaagcaggaccaatagtagcaattattttagttttcataatttttatattgttat

SEQ ID NO: 8176 - DNA, 200 bp, Lawsonia intracellularis
cgtagcatcattatgtgtcaagatattttaaatatactttatataaatttcagatagtgacctcttgacagaatatataaaataaaacaaaagtggaaataaatggagataagtggagataggtggttaaaagtattttttctatttgatatagattctgtctttttcaataagatcaaaggtagatcatgcagtttcga

SEQ ID NO: 8177 - DNA, 200 bp, Lawsonia intracellularis
ggtcagtcatatagaaatattgattctaaggggagggttattcttcctccaggatatcgtgaaactctagaagagtattctagtgagggttcttttgtactgactacttatgataattgtattgtaggttaccctgagcctcaatggaaagaaatagaagaaaagttttctaagttaagaaacagttcaaaaaaactacg

SEQ ID NO: 8178 - DNA, 200 bp, Lawsonia intracellularis
tgattttcgtcgactttttcttggtggagcagaaaagcaatcacttgatcttcaaggtcgtgtaagaatttctcgagcacatatagaatatgcaaagttggatcatgaaattgttgtattaggccagggtgagcattttgaaatatgggatcaaaacagatttaaagcagttcttgagcaagattttgatgatgtggctg

SEQ ID NO: 8179 - DNA, 200 bp, Lawsonia intracellularis
atgaacttgtagaaagtggaattgattttcctttataacaaataacaagatgtatatcgacagcctttaattgtattattaatattttttctgaataaaaggtagactatgcatcagccagttatgcttgaagaaacaatagcaatgcttaagcctcatgcaaaaggaagatatttagatggaacagttggtttaggggg

SEQ ID NO: 8180 - DNA, 200 bp, Lawsonia intracellularis
gcattcatttgctattttacagtctgcaggagatggcgctgaactttgtggattagatcaagacaaaaaagcactcgccattgcagaaatgacgttaaagccttttaagaaaagggtgcatttagttcatactaagtatagttcttttcctctaatattaaaggctcttggttggaaattattagatggagctctcattg

SEQ ID NO: 8181 - DNA, 200 bp, Lawsonia intracellularis
atataggtgtttcttctttgcaattagacaatgcagaaagagggtttagttttttatatgatggtccattggatatgagaatggatcaagatgctaataataactcactgtttgagatagttaataaaagtcgacaagaatacttaaaagatattatttctcgatatggtgaagaaccacaagcaaatagaattgctaaa

SEQ ID NO: 8182 - DNA, 200 bp, Lawsonia intracellularis
gccattgtacaaaaacgaaggactaagcctattacaaccacaaaggagttagccgatcttatagaacaagcttacccagcagcatggcgtgctaagtctcgtcatcatccagcaacaaaaacgtttcaagcttttcgtatagtggtaaatagtgagcttaatgagttagaaaaatttttaaatatgattatgggttggat

SEQ ID NO: 8183 - DNA, 200 bp, Lawsonia intracellularis
agcaccaggtggaagagttgctgtgatttctttccactcattagaagatagaattgtaaaacagtatatgaagtcatggacaagaagttgtatctgtccaccatatgtcccggtttgcaaatgctttcataaacctgaagccatacttattacaaagaagcctattcgtccttcagaaaaagaaatatcagaaaatattc

SEQ ID NO: 8184 - DNA, 200 bp, Lawsonia intracellularis
gttctagaagtgcaaagttacgtgtagcagaaaaagtgttgctttgaagagttaaataatttttcaatcaaagatttattataatgcaaagaaaccaaagaaatttaatttcaaaaaataataaactaacttctcgaccattttctcttagttgggttttatggttaacgttttctattttattaagtatagggatgggg

SEQ ID NO: 8185 - DNA, 200 bp, Lawsonia intracellularis
ttaggtcttgtatggataagcattgagcatacagacttagcttacactataaaacaactacaaaatgagctgaatagtcgtgtagtttttaaaagtaaactagaagtagaaagagaacgtttgcttgctccatttgagcttaaacaaagagcagagagtgttggaatgcatgaggcagattccaaacaaatcagaagact

SEQ ID NO: 8186 - DNA, 200 bp, Lawsonia intracellularis
aactatacagtaattatataaaaatggttattatagaaagttatagaagtatttgagaagtaattatagataggctgtatggatctcaaattgtatattttattgttttactagttttagtatagctaaatttatagagtcaggtaaagattatgagttatttaggattatcacatcgacaaaataaatatcataagttt

SEQ ID NO: 8187 - DNA, 200 bp, Lawsonia intracellularis
acttggactacttctaggaaaaaagtaagaggaaaatatttttcttttaggatagataagtggaatgcttttaggtttcaaattgtagctattcttttttgtattgtttggtgtggattatggtgtcgatcagcttacatccaactatggaaaggtacttttttttcagaaaaggccagacgtcaacatattgccttaga

SEQ ID NO: 8188 - DNA, 200 bp, Lawsonia intracellularis
aacagtatctactccaagaggaaatattgtagataggaatggaagaattctagcaaaaagcatacaatgttattctgtttatgcagatcctttttccataaaagacatagaaagtactgcaataaagctttcaaactgtcttcacttatcagaagaaaccataagaaaattactccaaaagcaaaatcggtttgtatgga

SEQ ID NO: 8189 - DNA, 200 bp, Lawsonia intracellularis
tttctcgccatattgatgatgctacagctatagctattaatcaaatgaagattcctggagttatgttattaaaagaatatgaaagagtttatccatataaacatgttgctggccagctccttggctttgttggagttgatggaaatggccttgaaggtcttgagcattcatttaatgattatctcagtagtttttcaaca

SEQ ID NO: 8190 - DNA, 200 bp, Lawsonia intracellularis
aagcagcttgtgatgagagatgcttcaggaagaaggttttatatcaataatggagaagaattacacaatagtactagagagttacagcttacaatagatttacaaatacagtctattgctgaagatgctatagcacaggctgtcagcgaggttggggcaaaatggggtggggttcttattgtagatgttaaatcaagcga

SEQ ID NO: 8191 - DNA, 200 bp, Lawsonia intracellularis
gatattagcttggtcacaatatcctttttttaatcctaatgcatatcgtcaatataaacctagtgagtatagaaatcggttagctttagatgcatttgaacctgggtcaacatttaaaccttttttgattgctgcagctcttcaagaaggtattgttacaaaagatacattatttaattgtgaaggtggagtttggaaaa

SEQ ID NO: 8192 - DNA, 200 bp, Lawsonia intracellularis
ttaaaaatgttgtcattcgtgatgatggtacaccacaaaaagaactttctgtaacaaaaattttaagtcactctagtaatattggttgtggaaagatttctttagagcttggttcacaaaagttttactattatcttactaaattagggtttggacagcctactggacttaacattattgaaaataaaggtattttacgt

SEQ ID NO: 8193 - DNA, 200 bp, Lawsonia intracellularis
cgtcctcgtgagtggagtgaagccgatctcatttctactgcttttggacagagtttatctactaacgcacttcagcttacacagggttttttaacaattgcaactcatggtatatacaaaccaataagtctttttaagactcctttgaaaaaagtttctgagcagcgtattttttctgaagatataagtagcgaagtact

SEQ ID NO: 8194 - DNA, 200 bp, Lawsonia intracellularis
tacaatgatgcggcaagtagtagagtcagggacaggaaagcgagctgctatatctggagtttctatagccggaaaaacaggtacagctcaaaaggttgataaaacaggcaagtatggtcaagaacgtatagcctcttttgttggccttttccctgctgaagaccctcattatttgattatggttgttatagatgaaccaa

SEQ ID NO: 8195 - DNA, 200 bp, Lawsonia intracellularis
taacaaaaaaatatggtggagttattgcagctccagtgtttcgtaagatagctactaaagttatggcttatgtaggttctcctgaaagtcttcaatatcaagttgtaacaaaagaggaagaaaaaattagttctaataaggtttcttcattagttagaactaacaaaaaagaaaaaagctgttctaatacattagaagtt

SEQ ID NO: 8196 - DNA, 200 bp, Lawsonia intracellularis
cgtcaaaaaatagatagaaaagatccaattgagtacgctacatcattaaaaattcctgatgttgtaggaaaatctattcgtaaagctattgaactttttgctgggcaaggtcttgttccagaagttaaaggtaatggtattgttgtaataaaacaagagccagaagccggaactcatttaatcaaacaacatttattaga

SEQ ID NO: 8197 - DNA, 200 bp, Lawsonia intracellularis
taagaagtgtatcctttgggtttcggagaaataaaatgaatagatatcctcttaaagcccttgagtccgaactagagaaaaaacatatgctaatctgtatagactcacgtaaagttgagaaagggtgtgtttttgttgcacttccaggtagcagtgttgatggtgggctttttattccagatgctgtttctagaggcgca

SEQ ID NO: 8198 - DNA, 200 bp, Lawsonia intracellularis
gcatatattgtttgtcgccataatgaggtagagtattgtggtagtgcaatacctattgttgtggatgatcctagatatactttagggaggttagctaggattttttataatacaggaaatctatccatgccaataattggagttactggaacaaatggtaaaacaacaattacttatcttttagagtatctttttagggc

SEQ ID NO: 8199 - DNA, 200 bp, Lawsonia intracellularis
aaaaggaaacaggacaggtgtcattgggacaattgcttatcgctggcctggattttctaaagaagcaccacttactacccctcaatgcttagacttacatgcaatgcttgcacagatgcaggtagataagacagaaattgtgtttatggaagtttcttctcatgctttagatcaaaggcgaatagcaggtattagtttta

SEQ ID NO: 8200 - DNA, 200 bp, Lawsonia intracellularis
aaggggttatttttacaaacttaactcaagatcatttagattatcataaagacatgaaagagtattttcatgctaaagcaagacttttttttgaatacccatctaaaaataaaataatggtagcatcaatggataatcaatgggggaggaaattagcaaaacttgtcccagagataatagggtttggttttaaaaacaaa

SEQ ID NO: 8201 - DNA, 200 bp, Lawsonia intracellularis
ccaacacaagtttcaaattatttatttgggaaaatactttcttcttctagagccggcttacatctgcagatgagttttaaagataaggtttgggaactttgtacacctttagttggagtacataatgctgaaaacttgttggctgtacaagcaataagtctccaattgggtttagctcctgaggatttctgttgttttga

SEQ ID NO: 8202 - DNA, 200 bp, Lawsonia intracellularis
aaagtttacaggtgttcctggccgtcttgaaagaatagttaataaaaaacaattagatatttttgtagattatgcccatactccagatgcacttataaatgtactttctgccttacgtgatgttggttttaagcgaattataacagtttttggttgtggtggtaatagagataaagcaaaacgtccattaatggggaaag

SEQ ID NO: 8203 - DNA, 200 bp, Lawsonia intracellularis
ctgttgcaaaactatctgatgtagcagtgttaacatcagataatccacggaatgaagacccagagttaattatggcagatgttttaccaggcctcaaaaaagctaaacaaattattacagaaccagatagagagaaagcaattcgtcaagctatagaattagtttcacctggagatgcattacttgttgcaggaaaaggc

SEQ ID NO: 8204 - DNA, 200 bp, Lawsonia intracellularis
catgaatgtacacaacaaataggatttatgaaatatccctttagtgatcaaagtgtgatacggaaaattttaggatgcgattaagcttagatactatccttagcgttacaggaggtacacttgtagccccgactactggatataactcctatatagatggggtaagtatagatagtagagctattactactaattcacta

SEQ ID NO: 8205 - DNA, 200 bp, Lawsonia intracellularis
tttatatgtatttctggaaacattactgatggccataactttgttttaaaagctgtagaggaaggcgcatctgcaatacttgctagtcataatccttttgaaggagaagtgcctgtaccagtaatattggttccagacacattgaacggacttaaagtattagcacaagctgctcggaagatgacaaaagccaaagttat

SEQ ID NO: 8206 - DNA, 200 bp, Lawsonia intracellularis
tggaattactgggacagcaggtaaaacaacagttaaagagttagttgctcaacttcttacatcaaaaggaaaagttgctaaaaactatttaaattttaatactcaaattggaatgtctttttctattttagcagctcaaggagatgaagacttttgggttatggaggttggtataagcaatcctcaggacatggaagaat

SEQ ID NO: 8207 - DNA, 200 bp, Lawsonia intracellularis
taggaactatattaacacctgatattgctcttataataaatgtagggcctggtcatcttagtgggttgaacaaacaaggtgttgcttatcataaggcacaacttcttcgatatatgaaagatgaaggattaggaattgtaagtttggactatcctgatcttgttaaagaggtaaaggaacttcgttcaggtagtttattt

SEQ ID NO: 8208 - DNA, 200 bp, Lawsonia intracellularis
ttttcagtactagacaatcaatgtcgctattatagtaagtatacaggtattgtcgaaaatggatatggtacttatcgattatggcttgatgatgatatagtagatgtaacctctccctttttaggtaattttggtatggaaagtgtccttgcatccgcaaccatagctcataagttaggtgtatcaagtgattctattaa

SEQ ID NO: 8209 - DNA, 200 bp, Lawsonia intracellularis
acagcaattgttccaagcaatattacctcagaatagattttcttgtttcactcatggtaactggctgtgtatcgatgatagttataatgcaaatcctttgtctatgaatgcagtaatagagtcaacatataaactttcagacgaaaaaaagcctcttgtatatgtccttggtgaaatgcttgagcttggagattcctctg

SEQ ID NO: 8210 - DNA, 200 bp, Lawsonia intracellularis
aagcagagcatgaaaagattggtaagaaactggcacaaacaggagctagtataattttttggaaaggtggcatgatagacaatgttcttataggtctaaaaggaggtggctttaaaggtatcttagaaaaaatatctacagaacaagagttccaatcactatttttgaagcataggttagatgaagggatcattgtgttt

SEQ ID NO: 8211 - DNA, 200 bp, Lawsonia intracellularis
aaaggttctcgttctaataaaatggaagtatttgtagacgtatttatgaaactagtaggaacaaaataatgttgtataatatactgttccctttaagttcagactatactatattaaatgtttttaagtatattacatttcgttctgtttggtctttaattacagctttaattttaagcatattacttggaccttatttt

SEQ ID NO: 8212 - DNA, 200 bp, Lawsonia intracellularis
attcgttggttacaacgtataaactttaaacaacaaattcacgaagatgtaaagatccataagtcaaagacaggaactcccactatgggaggagttcttatatgtttcagttcgctatgtagtactattctttggagtgatttaacaaatatttatgtttggttaacgctattagtttttataggtttttcttttattgg

SEQ ID NO: 8213 - DNA, 200 bp, Lawsonia intracellularis
ctttcttgatgattatataaagattttacatcatcaaaataaaggtttttcagcaaaagtaaaattgttagcccaagttgttgtagcaggtattgctatgttatttttagtgtcagaacctgcttattctacaaagttagcatttccattttttaaatctttacatccagattttggttatttttatgttccatttgcaa

SEQ ID NO: 8214 - DNA, 200 bp, Lawsonia intracellularis
tattagttatggttggagcctctaatgcagtaaatcttacagatggattagatggccttgccattgctcctgtgattgtgtctatctttgttctttctgtatatatttatgtaacaggtaacgtaaagttttctcaatacttacaagttgactatattgctggtgttggtgaagttgcagttttttgtggcgcacttatt

SEQ ID NO: 8215 - DNA, 200 bp, Lawsonia intracellularis
ggagcaggacttggttttttatggtttaatgcatatccagcacaaatatttatgggagatgttggttcacttggacttgggggagttttagggtttttagcagtactttgcaaacaagaacttctattacttattgttggagctctttttgtattggaaacactttcagttattgttcaggttggatactttaagtggac

SEQ ID NO: 8216 - DNA, 200 bp, Lawsonia intracellularis
aggtggaaaaagaatttttcgaatggccccattacatcatcattttgaattaaagggtattccagagtcgaaaattattattcgtttttggattatatctattacttttgggttaatagctctttctgcacttaagcttaggtaacataggaataaatatgctttctatagctaacaattgttgtatatctttagctcaa

SEQ ID NO: 8217 - DNA, 200 bp, Lawsonia intracellularis
aatgaatggccattatataaagtagctgttgttggaactgggcgttcaggaatggcagctgcaagattattacattctcttggtgcttctatacgtatagtagataaaactagagaaaacgtatctaaaacctttatggattggattaaacaaacaaattgtgaggttatgtttggagaacattgtccaaaacagtttga

SEQ ID NO: 8218 - DNA, 200 bp, Lawsonia intracellularis
agatatagatatcgttattcctagcccaggagtccctcttaatttacttaagccacattttttgaatactattcaagtgttatctgagacagaactagcatggtatcagttgtctaatgaaaaagtcattgccataacagggaccaatgggaaaacaactatagcaagtttatgtgcagcaatgttggtagaacaaggta

SEQ ID NO: 8219 - DNA, 200 bp, Lawsonia intracellularis
taagtgtttttgttggtggtaatattggaactccactatcagaatatgttttgtgtaaaaagaaagtaagtgttgttgttttagaactttcaagttttcaacttcagacatgttcactatttcgtcctgatatagctatatgttctaatatttctataaatcatttggattaccatagaaatatggatgaatatatttct

SEQ ID NO: 8220 - DNA, 200 bp, Lawsonia intracellularis
gcaaagttgaatatatgtaaaaatcaatgtgaaagcgatcttgctattcttaagccagggatggaagcactagtagattcatataatttgaaagctcgagtagttttttatagagatttaggaaatttttctacaagtcgattattaggagtccataatcttgagaatgcagaagcagcttggctagcttgtaaagaact

SEQ ID NO: 8221 - DNA, 200 bp, Lawsonia intracellularis
aggtgttacagaggagatagcaaaaaaggttgtaacaacttttgaaccattagagcataggcttgaacaggtaaggcttttaaatggtgttttgtatgtaaatgattctaaaggaacaacagttgaagcacttcgtgcagcgcttgaatcttttaagcaaccaatactccttttagctggaggtaggtttaaggggggag

SEQ ID NO: 8222 - DNA, 200 bp, Lawsonia intracellularis
atctaacatcattacgtccaattataaaaaaacaagttcgtatagttgggctgtttggtaatagtcgagaatattttgaagatgcttggggagatattatcccaataacctgggataacacattagaacaagctgtaaaacgtctttcaaacttagcacataatggtgaagttatattactagctcctgctacttcaagt

SEQ ID NO: 8223 - DNA, 200 bp, Lawsonia intracellularis
tttgatcagtacatgaactatattgaaagaggtaatgactttaagcgaattgttcatgaggtgttgaatgagcattgttagacaacatagaagattatcaggatctaatcgacataaagatgatatcagtgatatagcatcatatgattggttgttactgactgttgttttgattcttttatgtatagggctgattatgg

SEQ ID NO: 8224 - DNA, 200 bp, Lawsonia intracellularis
tgttatcagcaagtgggatggtagcagagcgtcttacaggagataagtattacttttttaaaagacaatgtttatttaccattattagcggaattttattatgggttatggcagttataccacgctcattgatttacaaactccaatatccatttttgtttgtaattattggtttattatttttgacgattactccatta

SEQ ID NO: 8225 - DNA, 200 bp, Lawsonia intracellularis
ggagcaaaagtaaatggagcaaggcgatggatttctttagggttattttctattcagcctcttgaatttacgaaaatagcattagcactgtatcttgcatattttatgagtacaaaacaagaacttgtaaaaacatttagtaaaggcgtcatcccaccgtttgctgtaacacttattttggctattatgttacttgtaca

SEQ ID NO: 8226 - DNA, 200 bp, Lawsonia intracellularis
accagactttggtggtgcaatgattctaattatgattttattttttatgtgtcttgttggtggaacaaggtttatttatctttttttatcgatagctatgtcgtgtacaatagctgctgctttggtatggcattcaccatatagagcacgacgtcttgcagcatttcttaacccttttcaagatgcgcaaaatacaggat

SEQ ID NO: 8227 - DNA, 200 bp, Lawsonia intracellularis
atcaactgatacagtctttatatgcattaggttctggaggattctggggagcaggtataggtgggagtaatcaaaagatgttttacctccctgaggcacataatgattttattatgtcagtaataggtgaagagcttggttttctaggtattaccattgtaatggcattattatttttgttttttgtacgtagttactta

SEQ ID NO: 8228 - DNA, 200 bp, Lawsonia intracellularis
atagtagtgaaacaaagagaactaagggatcgtctctctgcttttgctgtaacattagttattgcattaggatgtatattaaatcttgctgtgataatgggtatggctcctcctaagggagttgctatgccatttttaagttacggaggaagcagcttattagcaacaatgtgctgtgttggtcttttattaaatttttc

SEQ ID NO: 8229 - DNA, 200 bp, Lawsonia intracellularis
tcgaattggtcgttagtgttatgaaataccggatagcaattactactggaggtacaggtgggcatgtatatcctgcacttgctgtagcagagcagtttcatgataaagcagatctattttttataggatctcaatatgggccagaagcagagatggtaaaaacatttaatattcctttttatgggcttcctgtcagaggt

SEQ ID NO: 8230 - DNA, 200 bp, Lawsonia intracellularis
gtgcttggaagaaagtggaaagctttctctgcattatacagtatgataaaagctatagtcaaagctagaaagattcttcagaaatgtatgcctgatattgtcgttggttttggttcatatgcatcatttgctccattagttgctgctaaattgaaacgtattcctactgctattcatgaacaaaatgttaggccaggatt

SEQ ID NO: 8231 - DNA, 200 bp, Lawsonia intracellularis
agctaaccgaatgttagctcgattagcggacagagtatttttatctgtgccagatacgttacatatttttactaaaaaaagtaaggttaggtatacaggaaatcctattcgtcaatctattgttgatttacattataaatttgaagatacaaaaaactcctctactagacatttacttgtattaggtggaagcttaggtg

SEQ ID NO: 8232 - DNA, 200 bp, Lawsonia intracellularis
caatagctattaattctattgtcgttgatggattaagtcgattgttttcaaataggattgttattcgtcatcaaacaggggtgcatgattgggaaagagtgaaagaaggatatgcattatatggtagaacaaattctcaggttactccttttattgatgatatggctgaagcatatcagtggtcagatcttgttttatgt

SEQ ID NO: 8233 - DNA, 200 bp, Lawsonia intracellularis
cgagcaggggcaacaaccattgctgagttggctgcagtagggaagccatctatattgattccttttccttatgctactcatgatcatcaaacgtataatgctcaatttcttgtaagagtaggtgcggcagtccttattccagaaaaaaatgtagtagaggttgatgtgattgaaaaaattatagcattatttaacgatag

SEQ ID NO: 8234 - DNA, 200 bp, Lawsonia intracellularis
agtaacgttagttaatatggctttagctgcacataaacatggacgtatagatgcagctacatgtgtagcaaatgaaattattgatcttttatcagctaatgcaatgaaatgaatagtaaaataaaaagtatttatatggttggaattggtggttctggtatgagtggaatagcagagattttattaaatcttggctatga

SEQ ID NO: 8235 - DNA, 200 bp, Lawsonia intracellularis
agtacatggctcagatattatggaatcccatattatccacaggctacgcaaactaggagctattatttctattgggcaccaggcagaaaatttaggagatatcagcgttgttgtaaaatctagtgctgttacagaagataatcctgaaatacagttagcacgccaacatggtattcctgttattccacgagctgaaatgt

SEQ ID NO: 8236 - DNA, 200 bp, Lawsonia intracellularis
tgacagagcttatgcggttacgtaagggagtggctattgcaggtacacatggtaaaacaacaacaacttctcttactgcaacagtttttgatacagcaggttttgatcctacagttgttattggtggtgtacttaatgcttatggtgctaatgcaagattaggacaaggacaatatcttattgctgaggccgatgaatca

SEQ ID NO: 8237 - DNA, 200 bp, Lawsonia intracellularis
gatggttcttttcttttattgttacctattattaatgtagtaacaaatatagatcttgatcatttggattattacagaagttttgaagaaattgaacatgcttttgtaacttttatgaataatgttcctttttatggcatgaatgttgtttgtggagatgatcctggtgttcaacgtgtattacctagagtgaatcgtca

SEQ ID NO: 8238 - DNA, 200 bp, Lawsonia intracellularis
ggttataacctatggttttgagtcatctaatcatatttgggctgaaattattgaatgtggaataataaataggtttaaagtcatagcccatggagagtgtcttggggaagttatacttacccaaccggggaaacataatattcttaatgcattagctgcaataggtgtagcattagaagtaggtatttcacccaaatgtt

SEQ ID NO: 8239 - DNA, 200 bp, Lawsonia intracellularis
gtattgagggacttgctaactttaaaggggtaggaagacgttttgaatataaaggggaaaagaatggaattactgttattgatgattatggacatcatcctatagaggtcgcagctacattagaaacagctcgaaaagtttttcctgatcgacgtattgttgttgcttttcaaccacatcgtttttctaggacccaagct

SEQ ID NO: 8240 - DNA, 200 bp, Lawsonia intracellularis
ttatttggtgagttttgccaagttctttctactgtagataagttattattaacagaaatttatccagctttagagaagcctattcctggaataaatagtcaaaatttagcacaaggtattcaacaaatttctaaaatagatgttacatattatccagatatagacgctgttttccatgcattacctcacgtgttgtgtgc

SEQ ID NO: 8241 - DNA, 200 bp, Lawsonia intracellularis
aggagatgtgctgattactttgggagcaggaacaataacgacgattggtccaaagtttttaacttgttagctgtatgtataatatactaggatggtagaacatgctacaaattactacatcacctgatttatcaacactcactacattgaggcttggtgggaatgctatagcattaattgatgtctttgaaaaaaaagcg

SEQ ID NO: 8242 - DNA, 200 bp, Lawsonia intracellularis
ttagagcagttaccccatcagatttataagataggaggtaaacctcatattcttggtggtggtagtaatattcttgctagtgatgggagtctgccatttgttcttatccgtagcaaaattcttcatgatccaatagttacatatatagatgaacaaggagttgtttttgtaaaagtttgtgcagcaatggggttagcacg

SEQ ID NO: 8243 - DNA, 200 bp, Lawsonia intracellularis
ttttttagcttggtgctgtaaagaaggtttatctggaatggagaacttagcaggaattcctggaactattggaggcgctgttgctggtaatgcaggttcttatgggctttctattggagaatgtatttatgagttagagattttttctttcaataatggtatgaaaatattgaaaaatgatgaaatacaatatgcatata

SEQ ID NO: 8244 - DNA, 200 bp, Lawsonia intracellularis
gaaagttttctattgatgaagaaccaggggaatttattattataactgccactgttaagttaaagtataagcaaaaacagcagattattgaggtaattagagaaaatgttgcaaaaaaaacatctgttcaacctgtacaagcaagaagtgcagggtgtatttttaaaaatcctaatgatggattatcagcaggaaaatta

SEQ ID NO: 8245 - DNA, 200 bp, Lawsonia intracellularis
ctagagcaagtaggatttaaaggaaaagggaaagatggaattggtttttcatctattcatgcaaattttttaattaatgaagggagtaaaaacagtaaaatagcatttgaacttgttcaagatgctaagcaagaagttcaaaaatcttttaacatcatacttcaaacagaagtaaaggtatggtcatgttaaaagataag

SEQ ID NO: 8246 - DNA, 200 bp, Lawsonia intracellularis
agaagatacaaagctaacaattataatagtaggatagcttcttatccctccctacatattagtaatgagaatattagatttggatctattgttacatggagttgctggtgttttattggaattatcgctttaatattattttattttagtggattacatctttatcgcttgataacaacaagtaattttttctgtataga

SEQ ID NO: 8247 - DNA, 200 bp, Lawsonia intracellularis
acgaattaatatatatggagcttcttttttccataggagtgacatacttaagtatacaaatcttcaaactggtataaatagtttttctgtcaacattgggaagatagaaaaaatattaagtagtaacccatgggtagaaaaagtatctgtaaaaagaaggttacccggaatttttgatatttttattaaagaatatgaac

SEQ ID NO: 8248 - DNA, 200 bp, Lawsonia intracellularis
ctagcttttggatccttaaagatgatattatttattatgcagatagtgttggaagaataataacgccattagatacagataactttaaatctttgccaacacttgaggttatggaaggtggggaaaaatttttgccaatacttaaagatttaattgtttttttggaatcttcaaattcaataatagatgtaggtacaatt

SEQ ID NO: 8249 - DNA, 200 bp, Lawsonia intracellularis
tcatcagtacgtttaagttcagctagtggcattgaaatactccttgaaaattatgatattgtgttaagttttgaacctcaggcatggaaagagaatttacaaaagttgtgtttagttttgtcggacttagcttgtagaggggaattaaaacaaaccagatctgtaacagcagtagcaacaggtgtttgggtttctcaaga

SEQ ID NO: 8250 - DNA, 200 bp, Lawsonia intracellularis
aaaaaatttttaactgtatagagtattaaagtttatctagacttttctaagaaaatatgatgtagcaataaagttatatgggtttgtatgaatcataacaaataatactacttgtataatattatttaaaaaaaaatactcaatagtttttgttgttataagtcgatcattattaactttggtttaatttatttaaggaa

SEQ ID NO: 8251 - DNA, 200 bp, Lawsonia intracellularis
gtagacatgcctcagtccgaattaattgttggtcttgatataggtacaacaaagatttgtgctgtcgttggtgaactgtctggggacgggagtgtcgatgttattggtataggtacaagcccttctaatggtcttcgtaaaggtgtagtcgttaatatagaacagacagtccagtccattaaaaaggctcttgaagaagc

SEQ ID NO: 8252 - DNA, 200 bp, Lawsonia intracellularis
tgagttgatggctggttgtgaaattcgctcagtatatgctggaattgctggaagccacattaaaggttttaacagtcatggtgttattgcagttaaaggtggagaagtatctcaaagagatattgatcgtgctcttgatgcagcaaaagctgtagcaatccctttagatcgagaagtaattcataccttaccacaagaat

SEQ ID NO: 8253 - DNA, 200 bp, Lawsonia intracellularis
atattattgatgatcagagaggtattatagacccattaggtatggctggtgtgcgtcttgaagtaaaagttcatattgttactggtgctgtaacttctgctcaaaatattgtacgctcttgtcataaaagtggtttagatgtttctgatattgttcttgagccattagcatcttctaagtctgttttaacagaagaagag

SEQ ID NO: 8254 - DNA, 200 bp, Lawsonia intracellularis
cgagaaataggcgtagcacttattgatcttggtggtggtacaagtgacattgccatttttgcaaatgattcaacaaaatatacaggggtgcttccacttggtggccaaaatcttacaaatgatatagcgtttggattaagaacaccagtagctgctgcagaaaaaattaaaataaaatatggatgtgttcttgctgatat

SEQ ID NO: 8255 - DNA, 200 bp, Lawsonia intracellularis
tattcaatctgatgaatatatcgaagtccctagtgtaggcgggcgtgagccccgaagattatcacgtcaagtattagctgaaatttgtgagcctagaatggaagagattcttacacttattgatcaagagatagtgcgttctggctttaaaaatatgataggagcaggcgtagttcttacaggtggaacagcccttattc

SEQ ID NO: 8256 - DNA, 200 bp, Lawsonia intracellularis
aaggctgtcaagagttaggagaacaaatttttaacttgccaactcgtataggatatccaagaaatgttggtgggctgaaagatatggtaaatagccctaaatttgctactgctatgggattacttcattttggtgcagaaaaagaagggatggagcaaagatttcgtattcgtactgagcacacaatatttaactcaata

SEQ ID NO: 8257 - DNA, 200 bp, Lawsonia intracellularis
ttatcacgtatgcgaaagtggtttgctgaaatttcgtaaaatagtaactatcttttaacaactatcccctgttaaaagtggagggatataatggaaatgctttttgatacaatggttcctcaagctaaaataaaagttattggtgttgggggtggcggaggtaatgctgtacagaatatgatagaatcctctttaagggg

SEQ ID NO: 8258 - DNA, 200 bp, Lawsonia intracellularis
tgttacttttatttgtgcaaatacagatgctcaagcacttgctcgttcaaaagcagatatcaaacttcaaataggagagaagcttactaaaggccttggtgctggtgctgagcctgcagtaggacgagatgcagcacttgaaagtattggcgtcattaaggaagctattggtgagtccgatatggtttttgtaacagcag

SEQ ID NO: 8259 - DNA, 200 bp, Lawsonia intracellularis
gaatgggaggtggaactggtacaggtgcagctcctattgtggctcaagctgctaaagaaatgggagcacttactgttggtgttgttactaaaccttttgtttttgaggggcacaaacgttcccgttcagcagactatggtataagccagttacgtgagtatgttgatagtcttattacaatccctaatgatcgtctgctt

SEQ ID NO: 8260 - DNA, 200 bp, Lawsonia intracellularis
acaattgctcctaaaaatgctaagcttacagatatgcttaaatgtgctgatgatgttttatatagtgcagtacgtgggatatcagatttgatcacagtcccaggtataattaatgtagactttgctgatgttcgtacaataatgagtgtctctggtcttgctatgatgggaacaggttttgcttcaggagaaggaagagc

SEQ ID NO: 8261 - DNA, 200 bp, Lawsonia intracellularis
tatagaggcagcccgtcgagctattacaagtcctcttctagaagatgtctctattacaggtgctaaagcaattctcattaatattactgccacaactgaacttggaattgatgaatatagcgatgcagctaattacatccatgaggcagcacagggatctggagatactaatatcattataggtacagcttttgatgaag

SEQ ID NO: 8262 - DNA, 200 bp, Lawsonia intracellularis
aggctggtgatgaaattcgtattacagttatagcaacaggaattgaatctcaggttggtgtgaaaatgcaaggttcaacatcttcaaaggcagctatgccatcttttagaaagtctagccatattacaaacacaacatcatttaaacctgaagcaataaaacataatttggcatctgaaaaaccacggtatagaactcca

SEQ ID NO: 8263 - DNA, 200 bp, Lawsonia intracellularis
aggttattaacaaatcctatagagatggactataaaactcaaggagatcatagtgaaatttttacagaagatacaggggtaaattatagtattccaacgtatctcagagcattacttggaaaacagggagcccagtcttcaaaagaggaatatgatagaactcaccatggtgacaacaataagaaggatactcataaccc

SEQ ID NO: 8264 - DNA, 200 bp, Lawsonia intracellularis
agggcatgagaattttgtttttgatggtaatgagcaagatattccgatttttattcagaaacaagctaattaaaaattttagtatagcataataaataaaaaaccccattaattggggtttttatttctaatcttattaatagtttcacagctaccttcattgtagtggatgaaaagagatatgtatcttgagatagagc

SEQ ID NO: 8265 - DNA, 200 bp, Lawsonia intracellularis
gaaaatttttagtgataggtgatgactggaagtgcaataattctgcagtattatttaaacagggttatatacagacctctccatgtgttgtgcgtgtacgtatagaaggggtaaaaagctatttaactattaaaaaacagatagaagggattagccgatgcgaatttgaatatcctatccctatggatgacgcactctat

SEQ ID NO: 8266 - DNA, 200 bp, Lawsonia intracellularis
ttacttaacaatctttgtaaaaagccattcatttctaagcatagatatactgttttttatgaaggtattcaatgggttatagatgaatttttagatgaaaataaaggacttattattgctgaagtagagcttaaaataaaggatcaatctattatactaccttcatgggttggacaagaagtaagtaatgatccccgata

SEQ ID NO: 8267 - DNA, 200 bp, Lawsonia intracellularis
ttataatagtaatttagtacaatttccattctctcagtggagcttatcagaaaagagttaaacttttttaagggataaagaaggtgttcttgcaattatacaaacatcaatagcttgagtatgctgttttaataaagcttttgtagcttgttgtagagttgttcctgtagtcattatatcatcaataagtagaatacgta

SEQ ID NO: 8268 - DNA, 200 bp, Lawsonia intracellularis
atccttttacacctggatctgcttggaatgcgtttttaatgttaagaagacgttgtgtctgtgataaccctgtttgatgggatgtaggtataacacgacttaagaggtcatgcctaagtggcctttttaaagcataagaaacaggcctagctaactcttggcattgattaaaacctcttttgtgtaatcgagaaggatgt

SEQ ID NO: 8269 - DNA, 200 bp, Lawsonia intracellularis
aatggcataggaataatagcatctggagtaggaagttttaagcaacattcagcaagtagtatccctaatagttgagtgatacttggattccctttaaatttagattggataagaagttttttatactcgccttcataggcatttaaaaaatagaaatgttcccagcttggtggatttttaagacaattattacaaggagt

SEQ ID NO: 8270 - DNA, 200 bp, Lawsonia intracellularis
aataggtgactgtttatctttattaagttctccacatgatgggcaataaccttttgtgcgtggttgtaatagatatctgcactgtaaacaaagttttttctttttatttaaactgttatttatttttggttgttgtattttaatagaatgattagtttgcacaaatggtatatgacataaggtacatcgcttttcatacc

SEQ ID NO: 8271 - DNA, 200 bp, Lawsonia intracellularis
ttattgtatttataattgaatatagaaacttaaacttcatttttcttaacttaatttagattgaattattttggcaaatgaagacacttgagcttgagcttcattagagtgtgaaaaatcatgaggtccatcaagatcacgtagaagcagtgtatcacaaagagaaaaacctatacattggaaaaagcattttaagatta

SEQ ID NO: 8272 - DNA, 200 bp, Lawsonia intracellularis
ataaagttgcctcaaatacacgctcgcctttatttcttgctgcaataagagtaacaaaagctggttttaaaaaaggattattaggaattggttcatataaggtataatttgagttattccaatacttttgagacctatcaataaagcttttgagttgtgcaggtgggccatagaaaaaaattggtgaagcaataataagt

SEQ ID NO: 8273 - DNA, 200 bp, Lawsonia intracellularis
gtacttgcagcacggattttatcaaatagccaacctacttcatcatttgcttcaagaaaacattgatctggatgtgttatacagaatccacaagagatgcaaggtctaatagataaagaacgtaatgggatgatttctataggaagtaggacatcatttaattctttaaaaagagctgctcctattgagtctgtatttcc

SEQ ID NO: 8274 - DNA, 200 bp, Lawsonia intracellularis
atttgctctaggactacatgtaagtaggataatattagacatgctctttctctacggttatctgttaatcataattttttatttatgatatatggtttttattgatttatttgtagcttattgaaagatccattctaatagtgctttttgcatatgaagcctattttctgcttgatcccacacaagagacttttcgcttt

SEQ ID NO: 8275 - DNA, 200 bp, Lawsonia intracellularis
ctatgacttgatcagaaacttcttctcctctatgtgctggaagacagtgaagaaattttacgcttggcgttgcttggttcattagtgtgttatctacacagaaatctttaaagtcttctatacgttttttacattctttttcttgccccatagatgtccatacatctgtgtaaatataatgagcatcttttacagctagc

SEQ ID NO: 8276 - DNA, 200 bp, Lawsonia intracellularis
agtggattatttgtaattgatatttttgcattatttttttgagcaaaatcaataagttctttgtttggttcatatcctttaggtgtagctattgtaagtttaaagggaaagtacatagatgcttctatccatgagttgagtacattattaccatcaccaacccatgttatattgatatttgcaatatctgaagtttgctc

SEQ ID NO: 8277 - DNA, 200 bp, Lawsonia intracellularis
gtatatagtaagaagatctgccattacttggcatggatgaccatgatcagtaagtgcattaataataggaatagagcctagttgtattagctcataaagtcttttttgttcaaaggttcttataattatacagtctacatacctagaaagtacacggatagtatcttttaaaggttcttctcgtccaatttgggtttcat

SEQ ID NO: 8278 - DNA, 200 bp, Lawsonia intracellularis
taggtgttagaaaaatagtagtacctccaagttggcgtacagcaacttcaaaagaaacacgagtccttgtagatgctttttcaaaaaggagggcagctactttcccctgcatacattgatatggattagttttgtgatctttcatttcttttgcacgtagaagaagttcccatgcttttgactgtccaagatcagctatt

SEQ ID NO: 8279 - DNA, 200 bp, Lawsonia intracellularis
gttataaagtgatttatcatatgtagcttgttgatataggtaaattaaataagaagaaatgtaatcaacctctttaataattaataaataacgttaagatagagctctaagtgaaagtattatattttttataatctttttttaaagttaacgttagtattaactaatttataattttttcttctttgatagttattttt

SEQ ID NO: 8280 - DNA, 200 bp, Lawsonia intracellularis
gcttgtttctcaagcatagttaagaaacctttaaacatctgttcacgttttgactttacaattgctgacataaacgcttcttttatgttatcccattgttcttttgatggatacacaacttcttttgagacataagcaatcaggacaccctgttcaactgtataaggtgttgtaagccagctgcctggtgttgctttaaa

SEQ ID NO: 8281 - DNA, 200 bp, Lawsonia intracellularis
ggtatcgggaactagttgtgggttcttcaagttttcaatggttgctgaacgtattattgctgggctagtttttaaatttttagctactgctggtgggatagatgaattttttaatatagtaagctgttcttctgctgctttcatggctaactcgttagctttttgtttttttaatagactactaatttgattttctacca

SEQ ID NO: 8282 - DNA, 200 bp, Lawsonia intracellularis
cttcgattgattttattgattcaggttttatatcttttactttaatgataacatatcctgttttagtaataagcggattttctaatatagtcccagggctaacatgagttaacttagagagctcatcaggtttagccagttcaagttggcttgctatatcttttatagggaataaacctgtagatatgggggaaagatta

SEQ ID NO: 8283 - DNA, 200 bp, Lawsonia intracellularis
tagggttttcctgcttctgtaagacttttattttctataagagcaagttgaacattttcaaggacatcttgaagttctattgatgctttatcttctgctaaacgttgttgaatcgtttttgaaacttcatcaaaactttttatttcttcaggctttttatcgattaatttaataatatgataacctacaggtgtttgaat

SEQ ID NO: 8284 - DNA, 200 bp, Lawsonia intracellularis
aggttgtgatatttctccaggtgttaatgaaaatgcaacgtcagcaaaagcaggtacagcttgttcatatgtaaaccatcctagatctcctccattttgagcaacattatcttgagagaattttttggctacacttgaaaagtcctcgcctttttttattgcattggctgcttggttaattttttcttgggcttttttta

SEQ ID NO: 8285 - DNA, 200 bp, Lawsonia intracellularis
gaacttcaggttcactattttctggtgcaaagactacaatatgttgagcatgaatttgttcaggggatttaaagtcttctttatgtttttgatagtattcagagacagttgtgtcatcaattgtttgattattagctaaagatcttggggtaataagaagatattctaaattaagttctgtaggtgttttaaattgttct

SEQ ID NO: 8286 - DNA, 200 bp, Lawsonia intracellularis
gatgattcattataaaatttagctacttcatctgctgatatatttaccttgttaaggtagtcctctgtgggaaaaagtaggtattggatagtacgtgtagcactttcatacatatatacgtcataagcttcagtaggagaaatataagctcctgccgtaatttcttgttggattttatttataaggagatttgtacgtat

SEQ ID NO: 8287 - DNA, 200 bp, Lawsonia intracellularis
ttgtgattcaaagtgtccaggggtgtcatttcgttctttaagaaattgtaaataaatagcaggatcaaatttaccttcagtattatgaaaggcaggaaaggattcaatagtttttcttaattctattggtgtaataataagacctatacgatttgcttcttgcaatactaaagtttcaaggattaactgttgtgtggcta

SEQ ID NO: 8288 - DNA, 200 bp, Lawsonia intracellularis
attgtttaattcgaaatgtattgatttctgcagcagagatagtaggaaaattttgtcgtatattttgttctatttcttcacaacgtttttgaagttcttgtattgtaatagactggccatttacagaaacgacttctacttctggtcctcctgagagagtgccaataccccaaaatataaagacaataataattaatcca

SEQ ID NO: 8289 - DNA, 200 bp, Lawsonia intracellularis
aaagctattttgaccccccaagattgggcatttgatcgaatgaagtctaacataatatctccacaaagtgtattttctgcatacagttcatcttaatttattataaattaacgatttgaagttttaaataaaatttttattattcatttagcgaattatcttttattttaattatagtgcttaaatattattctataata

SEQ ID NO: 8290 - DNA, 200 bp, Lawsonia intracellularis
gaattagttagtctacagaagtaacataacaagtacatctgtaatttaagttatctaatagatatacctggaaataatttttggatcaagttagatatttatactatgttatttctattgtctatccttactgtaaagtaaagataaactaaatagtaaaaccttgttctttgtattcattcagcttatttcttaaagta

SEQ ID NO: 8291 - DNA, 200 bp, Lawsonia intracellularis
cgtatagagatcccaagtagttcagctgcttgagttctatttccagatgttgcttctaggccttttataatcattagtctttccatttcatgaagtggaataacggcattagggaatacagaagaagtggtagtagcagtggtagattttgattgtggatgtgtttggagcgcttgtgtagtattagatatagtaataac

SEQ ID NO: 8292 - DNA, 200 bp, Lawsonia intracellularis
ttcaggtattatagactctgtttgttgctctagcggaacttcatcaaaaagaggccattcttcagtttcaaggagaaaatgattaggggtgattaatcctcctccagcaagaagaacagctcgttccataaggttttgtaattcacgaacatttcctggccaattatgattttttagccaggtagtagcttcttgggata

SEQ ID NO: 8293 - DNA, 200 bp, Lawsonia intracellularis
attttgttggtttaagatgatattcttttgtatacatattaataaagaaattagcaagttcaagaatatcatctccacgctcggctagtgatggaagacgtagtggaatcacattaagtctaaaaaagagatcttgacgaaatttgccttcatctacccatttctccatatctctattggtggtagcaagaacacgaaca

SEQ ID NO: 8294 - DNA, 200 bp, Lawsonia intracellularis
tcaactttaattgtttctgtaccaccaacacgatcaatctcaccctcttgtaatacacgtagaagttttgattgaagagcaagatccatttctgaaatttcatctagtaaaattgttcctccagaagccagttcaaacttgccaagttttcgtgcaatggctccagtgaaagaacctttttcatgaccaaagagttcgct

SEQ ID NO: 8295 - DNA, 200 bp, Lawsonia intracellularis
ttctaaaagatgttctggtaatgcagcacagttaactgcaatgaatggccctttacttcggttactccaagcatgaagtgtacgtgcaaacatttctttacctgttcctgactctccagatattaatactgatgccttagaaggagctacttgctttgctagtgcaaggacacgtcgtatagcaggattgcttccaataa

SEQ ID NO: 8296 - DNA, 200 bp, Lawsonia intracellularis
tagtaggtgcactagaaagatcttctggcttatgaccatcaagagttgactttgaaggtagtggggttagtttatatgatttttggagaacagttttaattttttctgtggaaagtggttctagccaatagtcttgagcacctaaagtcataaggcgttcagcttcttctgtagttcccttgtctgtggtaaccacaata

SEQ ID NO: 8297 - DNA, 200 bp, Lawsonia intracellularis
ggtggaaattttggatcttctttagcaatattaaaaagctcctctactttatacccaggaagtgtaggtcgtgaaattatgatatctggacgtgatttttttattgcagcagaagcactgtttatattttcagcaaggctcacttctattccagaatctcgcaattctgggaagatgcgagtaatgatatgtgatggtgc

SEQ ID NO: 8298 - DNA, 200 bp, Lawsonia intracellularis
aagaaaaagaatatgttgtttcatcattgcttgaaagcttattagctaactattacagggtatagaatataatagcacattaaagagttatagtaaaaagattaagaattatttatattaatatatatattatgtaattatgtagtatattcacctatctttttttattagttatatatgttattattataattatacac

SEQ ID NO: 8299 - DNA, 200 bp, Lawsonia intracellularis
tataattaaatagataaattatatactataattaaatacataatctgaaatagtatattgaagtaattttaacatatctactttataaataataactgctcaataattatggataaacatacttttgtacttgactgaatgtaaaaatacatgtgaatatccttttaagaattattattaaattataacatatatacata

SEQ ID NO: 8300 - DNA, 200 bp, Lawsonia intracellularis
gagtcgttgttgtggtgtattaaatatcagatgatttaagctttaaggatataattatgaagtgtaatcagtgtgaacaaacagcagctaatgattcctgcactaatattggtgtttgtggtaaaacagataatgtgagtcatcttcaagatgtattaatttatgcattgagacggttagcacatgcagcactttctgca

SEQ ID NO: 8301 - DNA, 200 bp, Lawsonia intracellularis
agagctaagggaattattgttcctgaaatagatttttttactgttcaggcattattcattactcttacaaatgtaaattttgatcctaatgttattgagaggtttatcgaacaagctataataaatcgaaaaacatttgctcaattaagaggttgtaaaattgataatagtacacgtcctatagaagaagtaaaatctat

SEQ ID NO: 8302 - DNA, 200 bp, Lawsonia intracellularis
gatgagtatgcctacaggaattgatgattttcataaagacaaaaataactgttcggctatgcaaatgctcctttatggacttaaaggaacttctgcttatgcataccatgctgcagtccttggtaaagacgatccaaatctatatgagtttatttatgaagggttagcagcaggtttcccggatcgagaggggaatattg

SEQ ID NO: 8303 - DNA, 200 bp, Lawsonia intracellularis
ataaggagcgaacacttagtgattggatggatttggttctgcgttgtggaaagagtaacttacgtgctatggaacttttagaatctgggaatgttgaatcttttggtgtacctacatctacaaaagtttctcttggtcaaaaaaaaggaaaagctattttggtttctggtcatgatctgaaagatctttatgatctttta

SEQ ID NO: 8304 - DNA, 200 bp, Lawsonia intracellularis
tgtcagacagaaggaactggtattaacatttatacacatggagaaatgcttccagcacatggctatccaaaattacatgcatttacacatcttgtaggccattatggtactgcctggcaaaatcagcataaagaaatatctttattcccagggcctgttctatttacaacaaattgtattcagaatcccaaagaatatat

SEQ ID NO: 8305 - DNA, 200 bp, Lawsonia intracellularis
tgaaaatgtttttacttcaggtgtcacaggctggccaggtgtgcagcattgtaaagatggtgattactctaagcttattgagcgtgcaaaggaacttccaggtttttctgaagatgttccaggaaaagagctcttaacaggatttggtaagcaatctctacttgatgctgcacctgttatccttgattcaattaagtctg

SEQ ID NO: 8306 - DNA, 200 bp, Lawsonia intracellularis
gagtccttcaacatatctttttagttggtggttgtgatggtgcaaaacctggacgtaattattactcagaatttgttgaaaaagcgccagataatacagtagtattaactcttggttgtggaaaatttcgtttttttgacaaagatcttggaatgataggttctcttcctagactaatagatatgggacaatgtaatgat

SEQ ID NO: 8307 - DNA, 200 bp, Lawsonia intracellularis
gcttatgctgcacttcaggttgttacagctcttgcagaaattcttgactgtggagtgaatgacttacctgtttctcttgtgttatcttggtatgagcagaaagcagttagtattttattaacattattagccgcaggagttaaaggtattcgattaggacctagtcttccatcttttgtttcagaagatattttacaatt

SEQ ID NO: 8308 - DNA, 200 bp, Lawsonia intracellularis
gctggttaaggaatggggaattgctcctattacaacaccagataaagatattgctttattaatgcagtaagatattatagaatgtattatatgttataatatattaatgtataactatgagtaagttatattgatagagtctcttgcaaaagagactctgttcatttatttttattatgtatttactattgaactactac

SEQ ID NO: 8309 - DNA, 200 bp, Lawsonia intracellularis
aaattgtaattatagttatataagagttataatttgatagttatatataaaaagtataaaaaagctaatctatttatatattgacatatatattttatatattgacatatatacaatgataaattttttgtttgtttttatagtatgatctagtagtttttctttatctaggagggactatggcacaaacaaatatttta

SEQ ID NO: 8310 - DNA, 200 bp, Lawsonia intracellularis
cttgaaactggaacaaatgagcttgaaatagttgagttctacattgatgagccggactatagaggctattatggcataaatgtagctaaggttgttgaaattattagagaacagcctgtcacagctatgccagaaatgcgtcatccatcagtaatgggtgcatttttatatcgtaatggccgagtcgttcctcttattga

SEQ ID NO: 8311 - DNA, 200 bp, Lawsonia intracellularis
tctatctgtatacttaggtggtgcaccaattaaaaatacagattcacgggtcattattacagaatttaatatggttatgaacagtttcattgtgagtggtgtaaaccgtatccatcgattaagttggcttgatattgagccacctgggaaatttatccaaacaatgagtcagagttctatcacaggcgtagttaagatgg

SEQ ID NO: 8312 - DNA, 200 bp, Lawsonia intracellularis
atgatagagtagtttttattttagatcttgaagcaattgttgcagaattacatccatctttagctattcgtatggatgaaacttctgatcatgatgtacctgaacatccatataaaattcttcatgcagatgattctgctagtattcgtaagttaatttactctcttttaggaaaagaaggacgctttgaagtaacacaa

SEQ ID NO: 8313 - DNA, 200 bp, Lawsonia intracellularis
gctgtagatggtcaaggtgcttgggatttattaatgaaatatcgtgatgaagctatagcagaagatagacctattactgattttatagaaggtgttatcacagatattgaaatgccaaatttagatggtttaaccttgtgtaaacaaataaaagaagatagcgtattaaaagtgattcctgtggctgtattttcttcctt

SEQ ID NO: 8314 - DNA, 200 bp, Lawsonia intracellularis
aatcaataatagcttaattgcaaagtgtaaaaaagtaggagctgacgcacaatttgctaaaccagatcttcaatctttaagtgatagtatgtatagtcttattaaatctaaagagttagagctttctcgtaaaatatgacaagaagctatcttttttgtgcgtttttgaatatatattatgaatgaagtgttaggagtta

SEQ ID NO: 8315 - DNA, 200 bp, Lawsonia intracellularis
ttgcgggtagtggacagttcccatttatggttgtgaagggagctcaagagaaaggctataaagttattgtttgtggttttcatggacatacagatagcaagttagaagatattgcagatcattttgaaatgatgccattaggccaatttaataggttgatccgtttttttcgtagatcaggtgttattgaattatgtatg

SEQ ID NO: 8316 - DNA, 200 bp, Lawsonia intracellularis
gctggagcaataaataaacctcgagcactacaagttagaccagattttagagcttttcgtttatacttttcgctttgcaggaaaggagatgatgccttatttcgaacaattataaaggagtttgaaaaagaaggttttttgatggtttctccttcaacttttgtcccttttttacattgtcctcctggggttttatctaa

SEQ ID NO: 8317 - DNA, 200 bp, Lawsonia intracellularis
taaacaacctgataaagatatattagctgaaataagttatggctggcctattgcaactagtttaggaagatttgatataggtcaactaatagttgtaaaacagcaaatggttatagctatagaatgcttagaaggcactaacgcaactctacaaagaggtgctgaacttggagggaaaaactgtgtggctattaaaatag

SEQ ID NO: 8318 - DNA, 200 bp, Lawsonia intracellularis
ctaagcctattcaagatgagagagtagatttaccagcaattggtcttgaaactattcatttattagtaaaatatcagtttaaatgcattgctgtttcagcagaaaaaacattattttttgatatgcctgaagccttaacattagctaataaacataaattatgtgttatgtctttatctgacacagatattaggtagatt

SEQ ID NO: 8319 - DNA, 200 bp, Lawsonia intracellularis
tataataggttatagttatattatttaatgcttaatagaaagagagacaaagaaaatttaaactatcccatcagaaaaaagtgaagttacagtctgacaggatagttatattctaattattaaaaaggagattataaaccttttgtacgtaaaaagttagataaatcagcaactctacaagaatagccccactcattatc

SEQ ID NO: 8320 - DNA, 200 bp, Lawsonia intracellularis
ataccaagaaataactttagcaagattatctgtttgaactattgtatattcttcttctacaatagaagagtgagaatctcctttaaaatccatggatacaagtggagttctattataggccataatacctttgaggtaggtattagatgcttcttctaatgccttgcggattgtttcagtgtctgaatttttctttaata

SEQ ID NO: 8321 - DNA, 200 bp, Lawsonia intracellularis
tagcagtgaaatcgacaatggatactgttggtgtaggcacacgtaatgaccagcctgtaaattttccttttaattctggaataactttagctacagcttgtgctgcacctgtagatgtagggataatattgcaagctgcagcacgagcacgacgtaaatctttatgtggtagatcaagaatacgttggtcgtttgtataa

SEQ ID NO: 8322 - DNA, 200 bp, Lawsonia intracellularis
gaatgaacagttgtcattgttccagattcaataccaaaatgtttttcaagaacaagggctattggtgctagacaatttgttgtgcatgaggcattagagataatattatccttagttggatcatacatatcttggtttacacccataacaatcataatatcttcaccttttgttggagctgtaataataacttttttggc

SEQ ID NO: 8323 - DNA, 200 bp, Lawsonia intracellularis
tccattattaaggtgtactctagcttggtctgcagttttgaaaattcctgttgattctataacaatatcaacaccaagacttgcccaaggaaggtttgttggatctttttctgcaagacattgaatagtccagtcaccaataataactgtattaccattaatatttgcatttaagttagctcttccatagttagtatcat

SEQ ID NO: 8324 - DNA, 200 bp, Lawsonia intracellularis
attcaagaagatgaaagttagtatttgtatcataaagatcattaacagcaacaacttctagttgttctttatacatagtataaattgctttaaatgtttgtcttcctatacggccaaatccattaatagctatccgtgttttactcattatttactccttccttataacataagtaatgggtagtatacagttagagaga

SEQ ID NO: 8325 - DNA, 200 bp, Lawsonia intracellularis
ggtaatagtactgcagaattttttttaatgctactactatgagacaatgaacttatatttgagctactaattaattttgtttgtaaattgttatacaatatagctctattatataaaaaataagataactatataatactaattaggtatattttataactgtaattaatttttaaataacaatatgttattgtgataat

SEQ ID NO: 8326 - DNA, 200 bp, Lawsonia intracellularis
taagttgctacagttagctttaagtataacttttattttgtaacatttattattttattcaattattattttattcaatgaattccagttgtttttcttttttataggctgtgagaatagcatctatgatatttcctcttatagcagttctatccatatggtttatagctgcaatagtaatacccccaggagaacaaact

SEQ ID NO: 8327 - DNA, 200 bp, Lawsonia intracellularis
tgttcacgcaataaagcaggatggtttccaggttgagttgctaatttggctgaaccattaagaagttcacttaccatataaatagactgttgacgggggaatcctagtgttacagctgcttcaactaatgcatccataaagtggaaaacatatgcagggccacatccaataagagctgtaaaagcactaaattgcttttc

SEQ ID NO: 8328 - DNA, 200 bp, Lawsonia intracellularis
tggcaaaattattggtaatccaataagagaaaatagatcaatgacactttgtgattgctcattagaaagttttggatcttctaagcaaagagcaaagattcctgatccaacaagcgcaggcgtatttggcattactctaataacaggacagaaggattcaactgcttctgtaagcattatttgtgtgatacctgctgcaa

SEQ ID NO: 8329 - DNA, 200 bp, Lawsonia intracellularis
gtgaaataataatatgacctggtcttaagaacggtaaacattcttttaaaataggaactacagcagaaggttttgttcctaatatgatgatatcattttgttggataaggttaggtatagtgtcaatagattgaactcctttttcctcaagaggtgctaatttttcaggtgtcctattgtaaccagaaaggataagacca

SEQ ID NO: 8330 - DNA, 200 bp, Lawsonia intracellularis
ttatcagggtgtgccattggtacaaggctagatagaatagcactacccatggttccacaaccaatacagccaactcggacaccaacaagagaatcttgacagagcattaccgtatcctttcaaaggcattaaaaaaataattaatctctattattgcattttcatcagaatcagaaccatggacagcattttccattaaa

SEQ ID NO: 8331 - DNA, 200 bp, Lawsonia intracellularis
ctaattgcaaaagattttcgaatagttccttcctgtgcattttgaggatttgttgctcccattagttctctatagcgagtaacagcattttctcctgttaatataagactaacaatagggccagagatcatgtaatcaacaagttcattaaaaaatgggcgttcacggtgtacactataaaatccttcagcttgttgacg

SEQ ID NO: 8332 - DNA, 200 bp, Lawsonia intracellularis
attcatttgtaacattttcatagctgaaatataaaagtcatttttttcaatcatgttaataatagcaccaatgagatttctttgaacagcgtcaggcttaattagagcaaatgtgtgttgcataattatgaattcctttagtaagttaaaaattattttttagaaaagtagtctgatttgactgtttctatatagatagg

SEQ ID NO: 8333 - DNA, 200 bp, Lawsonia intracellularis
ttgatatcttagtggtacaatatggatagaggtatccctcaatgaaatccatttttttaaggcagatatagtttctggataaggatgcccaataacaatagcttgtcctttttcaatagcatatttctcagctttttttaattggtttaatatagatgattcagtatgatgtccatggtcaataaaatgcgttcgatagt

SEQ ID NO: 8334 - DNA, 200 bp, Lawsonia intracellularis
aagctggtaatccttttcccttagctatattataaaatgaggatgaaggatgtgttttactatctaagacaaagagaccttttgatgcaagaattttacatacagtatgatttcctttctcattacatgtgaaacacgatcccatatggttattgagtcctgaagcatatggaattttttcaatatttttacaaagtatg

SEQ ID NO: 8335 - DNA, 200 bp, Lawsonia intracellularis
tttgaaatttcttcagcagacatttttgtatgtatttctccaggccctgctgagacatacggtgactgtatagattccattggttgatgtataagaacctcatttcctgtactatgcgtaagcatggcgatagatttagcatagtgagtatgtggcaaaattgaaagtgtaataggaaagtcaagcttaataagctgatt

SEQ ID NO: 8336 - DNA, 200 bp, Lawsonia intracellularis
agcagcttctatgctttcaccaatgtcatctattacaatagttattctaggtttttcatctatagggcattgtataaacttttcaccagtgggaataaaaataagttcatgagtggtaatttcatttatagaaagtttatagatgtgttctgagcatgctctaagttttatttcgtctgcccaagcttctaaattttctt

SEQ ID NO: 8337 - DNA, 200 bp, Lawsonia intracellularis
gtaaattagtaacaaaatattctacactatgtggcaaaaagatttttatttgttgaaatcggtatgtttcatttttattatgatagtattttgttaataaagggtaaactctatccttatggatatctagtcggataaatgtttgcataagagcaaaatctgtttgtcgtatcctattggtaagtgaagttgtggctttt

SEQ ID NO: 8338 - DNA, 200 bp, Lawsonia intracellularis
tcttgataaggtaagtcagtgtgtaggaaagactccctataggattgtccttttgggatttttaatgttgaaagagtttttttaggactttcaagtgatgtgatcttatctggttgaaaaaaatgtaatgtggtagaaataagttgataagaaatatacccagtggataaaataactgcagtaagtaaggatataagacc

SEQ ID NO: 8339 - DNA, 200 bp, Lawsonia intracellularis
agaccctaaaatggtacgtgccatatgagggtagggctgtagtaaatatatactatgcttagaaaaatatttgctaagtcttgaagacattgcgtcatatatttttacattgcaaataataactaaaattatagcaatgagattaatttgttataatatattataaaagtttactagttttattcaacttattatatgct

SEQ ID NO: 8340 - DNA, 200 bp, Lawsonia intracellularis
aactgaactgtatctgttataaaatttatttttgccgtatagtatatatcatgtcaataagattatctagtcttaaagataaagtgtttttttattaaaaaattaatttagataaaaataaatttgtgagtatcgttagtgagtactgagtatagtcacacattttttattaattaggttatagttattgtacagttatt

SEQ ID NO: 8341 - DNA, 200 bp, Lawsonia intracellularis
gaatttggcgaaattttggtaaagttttcactagttgtaaccccattcgaagttgattatctttatttaaaaattctttaacttctggtaaaggttcttttttgttttgttcagatttttgattatttttagtgttcttctcttcttttgtattagaagtatttttttccaaatgtttacgtaaatcttgctctctcatc

SEQ ID NO: 8342 - DNA, 200 bp, Lawsonia intracellularis
atatgaagagggttttgtgtttgtgtagctactggatttggatcaaaaggaagttcaatatctggttgaataccttcagcttggatagatcttcctgaaggcgtgtaatagagtgctactgttaacttaagaccagtttcatctgcaagagggacaatattctggacagaacctttaccaaatgtgcgttcgccaacgat

SEQ ID NO: 8343 - DNA, 200 bp, Lawsonia intracellularis
taaagcacgtttatgatctccaagagctcctgcaacaatttctgatgcagaagcagagcctgcatttaccaatacaacgattggagcagtgatatcacttgtattattggttgctttaaattctttactgctttcttccattctccctctaatagaaacaattgttccttctttaaggaagacatctgtgacactaattg

SEQ ID NO: 8344 - DNA, 200 bp, Lawsonia intracellularis
cttgttcaagaagacctccaggattacttcttaggtcaagaacaataccttggataggcccttttttagaggcggctttaagtacttcatttaattctgaggtggttctttcactgaatcgactaattcgaacccaatagtaaccaggttcaagttctcttgatttaatactaatgagtggaatagtctctctttttatt

SEQ ID NO: 8345 - DNA, 200 bp, Lawsonia intracellularis
tttatagttgttggctctttagcatccttatggagaatagtcagttctacttctgtttttttaggcccacgtataagagatgcagcctcttgtaaggacatttctgaagttggacgtccatttacagctaaaatataatctccagctttgattcctgctttgtctgcaggagtatcatcaataggagctactactgtaag

SEQ ID NO: 8346 - DNA, 200 bp, Lawsonia intracellularis
gtgattattctcttgtgtgatttcaataccaataccacaaaattctccagaggtagcttcttgcatctctttaaattcttcttctgtaagtaaagtagagtgtgggtcaaggctttgaagcataccttttagagcaccatcaacaagttctttgcgtggaacttctttaacataatagcgttcaacaatgtctaaaactt

SEQ ID NO: 8347 - DNA, 200 bp, Lawsonia intracellularis
ggctgaagcgtttaagtgcatcaaatttatctgagtcagatacagcagcaataacacaacttccaccaataaaaaggatactacctgttaaaataagggcagctacccgtaaccacacacgcatagactcctccaagcagaataatgaaaaataagattagctataaatagttaaaaaagcaatgtgtgacctaacaatt

SEQ ID NO: 8348 - DNA, 200 bp, Lawsonia intracellularis
taagcaaatatcgtttaattcaaacagagggcactgggagcaaaggggagtttttttatgacaccaatgcttgcatgttcggacaatgagagcatgatattcattaaaaagttgaagatgacatggaaggttttctaaaaataatgagcggatatcttcataactagctgttggttgaattagcttatgtctacttaata

SEQ ID NO: 8349 - DNA, 200 bp, Lawsonia intracellularis
tacgttttgtgtaggaatctacaacaaaactgggcttgtttaatgcataaagtaaaatagaatctgctgtttctggcccaacaccatggactaaaaggagtttttttcttaaatgttgaagggagatatctttaagtttttcaaaagaaaaagaacaagatgatgcaaaaaattgtaggatagcttttagtcgctttgtt

SEQ ID NO: 8350 - DNA, 200 bp, Lawsonia intracellularis
tttatattaaaaaatcctgctggtttaataagattagaaagttcactatctgtaagtgtaagtattttatttccatcatggaggacacctgcatttcggaggttgcagagagccttttctacattggtccatacagtattttgtgttaaaatagctccaataataacttcaagagtagtttcagctggccaccaaccact

SEQ ID NO: 8351 - DNA, 200 bp, Lawsonia intracellularis
agcttgtaatttatttaataatttttcgtatatttctattaagatagcttgatagtttatttcagggttcataatgtatttttagaatattacttttattttagatagtattatcttcagttttttcagttgacaggatagtaaggtagaacgtagatccgtttttgtatatagggcagttagctcagttggtagagcat

SEQ ID NO: 8352 - DNA, 200 bp, Lawsonia intracellularis
cgctttcacatggcgggggccacaggttcaagtcctgtactgcccaccataataaatacaaagaagagtgattacctattgatatatatgtaataattttttttactagtctagtgttaataaaaaaataaaaaaattataaaaatagttgcaagtaatggatattttttatataagcacatttcgatatttataggcta

SEQ ID NO: 8353 - DNA, 200 bp, Lawsonia intracellularis
tattggagcggtagttaaggtggttataacgccggcttgtcacgccggaggccgagggttcgagtcccttccgctccgccaatttttttaatttcatttatcttttattttctagttaagatggtgtaaattttttcagtcgtaatgcattaaggacgacagatatagatgaaagtgccattgcaagaccagctagcata

SEQ ID NO: 8354 - DNA, 200 bp, Lawsonia intracellularis
ggtgaaagtaaaggcccaccaaagagttttaatatacctgcagcgattggtatacatattatattataaccaaatgcccaaaaaagattttgtcgaatattcctaagagtagcacggctcaataagagtgccgaaactaagccagatagtggatgatttgttgataaagaattaagaagaacaatatcacttgtttcaat

SEQ ID NO: 8355 - DNA, 200 bp, Lawsonia intracellularis
tgctatatctattccacttcctatggctattcctacatcagccttagcaagagctggtgcatcattaataccatcaccaaccattccaacacgaaatcctttatttttaagttcttggatagcataagctttcccttctggcattacatcagcaataacttcattcaggtgtaaatgattagcaactatttgagctgttt

SEQ ID NO: 8356 - DNA, 200 bp, Lawsonia intracellularis
gtttactatcacctgtaagcataattgtacggattcccatatgctgtaattgttctgttacactattactttcttctcgaataggatcagttactgcaattatccctgaaaactgtccatttatagctacaagtaaagatataaagctttgtcctgcaaattcttcaagggttgttattcctactttattgtctaaagaa

SEQ ID NO: 8357 - DNA, 200 bp, Lawsonia intracellularis
atatgatgttcttcaaggaatgttttgttaccaactaaaacagttatagattctgtcttcacttgaagttctccacgtactcctcgaccaggataggacataaagtttataacagggtaaagtacaaggccatgtttatgtgcagctctcacaatagcatctgctaaaggatgttctgatacagcttctaatgaggctgt

SEQ ID NO: 8358 - DNA, 200 bp, Lawsonia intracellularis
tatacgaagaagttcattatctggcattgtttttaggggaactgtatgaataaggtgtggttttccttctgtaagtgttcctgttttatcaaaaacaatagtatcaagatctgctgcatattcaagtgctgcaccagatttaataagaagtcctaattgtgcccctcttcctgtggcaatcataattgacataggagttg

SEQ ID NO: 8359 - DNA, 200 bp, Lawsonia intracellularis
ctaatcctaaagcacaagggcaagatattacaagtacagtcataacaatacggatagaatctgcaatagatgtatcgccaagtaacaaccatgtaagtccacttactaaagctatagctataactactggtacaaagataagacttatttggtctgttatacgagatattggtgctttagaaccttgtgcttcacgaact

SEQ ID NO: 8360 - DNA, 200 bp, Lawsonia intracellularis
aggcgtataatgtgtgctaacgctgtattaagtccaactttttctgcatgcataagaaacatgcctgaaaggtttatagtaccaccaataactttgtctcctacagttacaaaaacaggcatagattcacctgtaagcattgaagtattaatgcttgaagagccttttaatattttcccatctacaggaacttttgagcc

SEQ ID NO: 8361 - DNA, 200 bp, Lawsonia intracellularis
aggacgcacttgaacaatatctcctacttttatattgctaagaggcacttcctcaaaagattcttcttgatcagatagagaagaaaggcgtaatgctgtttctggaactaagttcattaatcggcttattgcatctgacatcctgaagcgtgagagcatttcaaaatattttcctaaagaaatgagtgtaataaggacaa

SEQ ID NO: 8362 - DNA, 200 bp, Lawsonia intracellularis
ctgctgtttcataatagagactaggttcagtataatagtttccaaagcttatttctattgtggaccatatactatagattatagcagcgctagtactaagagcaacaagtgtatccatattaggactcattttccagagccttgagaatcctataaggtaaaaatatctacctgaccaaattacaggaatagttaataaa

SEQ ID NO: 8363 - DNA, 200 bp, Lawsonia intracellularis
agttgtgcaatagcattatttagaggatatgttttaggattaacaaatacagggacaggaactccccacattggtcccattgaaatgaagagaactagtatagtaaaaaagaattctataataaggcgttgtttgagttcctctaagtaatgagagatggattcttgttgaagaatccatgttttttgttcagcaagatc

SEQ ID NO: 8364 - DNA, 200 bp, Lawsonia intracellularis
ttctgctaagtagttagcaataaaaccagttttttctgtttcagaaatgacttcttgaataagcttttttatattagcttcagggattggaataactgttgccattgaattattaaggcttacagtaacagattgtatttcaggaatattacctaatgtacgctcaagccttgaagaacatgaggtacaactcatgcctt

SEQ ID NO: 8365 - DNA, 200 bp, Lawsonia intracellularis
tgacaataaagttcaatgtctgttgtttagacacagttagctccaacagtattaggttgctatgcaacatgttataagcaagaacaaaatatttcttgtattgtttataatagttataataattttattatttcatcaccttatgtattaagattttctatttttgttgtatataagtctagactagtatatcgtctacc

SEQ ID NO: 8366 - DNA, 200 bp, Lawsonia intracellularis
agttattataaattttagatctaaatatttctgtaatagttttaccagtaatatgtgttagtaagtagattatgcatattcttctttatcaacctgagatacctccaaataccggtaatattgccaggttatgtgcagcaacacatacacctctccatcttatagaacctttagggtttaagctagaagatagatattta

SEQ ID NO: 8367 - DNA, 200 bp, Lawsonia intracellularis
aagagggcaggtcttgattattggaaacatgtaatattaaaagtttggcctcaactagatgattatttactttcagatggattaggacgacggcttgttataacaagcgcacgtggaggggtagctgtacatcaatttatgttttctgcagatgatactcttgtttttggtcgtgaaacagcaggattacctaaagattt

SEQ ID NO: 8368 - DNA, 200 bp, Lawsonia intracellularis
aatggatcaatatgaacataaagtgcgtattcctatatatagtacagtcagaagtctaaatctttctacagcagcaggtattattttatatcaagcactatctataactggtatgcttactaagataagttgatcttacattataaaaatttataactgtaataggttatagttaatttagaagaatgatgtgaaaataa

SEQ ID NO: 8369 - DNA, 200 bp, Lawsonia intracellularis
aaaataaataccaacaaattcaagaaatatggcaattgacatggcctcaagcctctatgttactatgccaattttttattagtattacagatgtttgggcagctggtcagttaggttcagaagtgcaagcttcaataggtattattgctcaagctcaaatgttattattatctcttgtcatggcagcatctagtggtgct

SEQ ID NO: 8370 - DNA, 200 bp, Lawsonia intracellularis
gtggcatctataagtcagtctcttggggctaaaaaatacatcagagcacagcgttatataggacttgttgtttttagttgtcttattcttggagtttgtctcacaattcttggagttatatttcaagtaccattcttagaatttgtgcaaacccctgaatctattttctctatggcacttatattttttgagttttatct

SEQ ID NO: 8371 - DNA, 200 bp, Lawsonia intracellularis
gttagcattgcctggccagtatatgttaactattggttctgctgtttttcgtgctgtaaaatctgtatatattcctttatatgttgctatcattataggtatactcaattttattggagatatggcttttggtcttggatggtgggggtggccttcatatggtgctataggcattgcatggactacatttatttctgttt

SEQ ID NO: 8372 - DNA, 200 bp, Lawsonia intracellularis
cttttgggggtgtggttatcctctttcttttattctataatcattggctcactcgatacagttttcccccttggtgttggattaagaaggggtccatgtatttactacaagttgctggaccctctcttgctactgcagctatttggcaaacagggtaccttgttctatttatcattgcaggaactctgccttctgaaggt

SEQ ID NO: 8373 - DNA, 200 bp, Lawsonia intracellularis
gttgctacattagcaggacttacagctggtatacgtatagaagctattttgtttttacctggaatagcttttagtatgacatctgctattcttgtaggatatgctttaggacttgggaataagcaagaagcaaagcatgtactccttatggttgtttttgtagcttgtttatctatgtcttttttaggagccatgttatg

SEQ ID NO: 8374 - DNA, 200 bp, Lawsonia intracellularis
gccttggagagatacacttgcagcttttttatcttctgatccattagtacgtcaggaaatagttagttaccttagttataatatactatgtgtgccgtttacaatagcaagtatagttcttgcaggagggcttaatggtgcaggtgcatcaatataccctatgattatttttggttgttctatatggggtatacggttac

SEQ ID NO: 8375 - DNA, 200 bp, Lawsonia intracellularis
ctttagcatggtttttaagtcattttttgtgggaaacgtcttcaggcgtttacatggcccttcttgtttcacaagttgtacagtcaatgttacttttatggattgtactacgttataattgggcacgtttttcaatgtataatagtatgtcaaaatagtttttagagggcactagggagtatagtaatgatatgactatg

SEQ ID NO: 8376 - DNA, 200 bp, Lawsonia intracellularis
ctatagacactgtcaactcagcttaggaggatatcatgagtgaagcagcgttttctccagtacatccttcaaaatttgataattataccttattatgggagatgactccccaacactcttctgactacacactaacaaatatctggggttggaaagatttttatggattggagtggatgtttgagtctggtttatgctgg

SEQ ID NO: 8377 - DNA, 200 bp, Lawsonia intracellularis
attcgtcagacacgtcatgttgatggagcagattatattttttgggctcctataggagattggaattctattgactgggttaatcttcccctttttaaaagaggattacatatgcaacgtgtgcctgaaatgttatgttctttattgcaagaaatattacccagaaagataaatatagaagaaacaccagggcagtggga

SEQ ID NO: 8378 - DNA, 200 bp, Lawsonia intracellularis
atatatttattcaacaaaagatcttactactctttcagggagaagatttgatagtaaaagaaatcacttaaatagtttttttagagaatacaaagaggactataggccaataggagattctaacatattagaacttattgagtttcaaaaagaatggtataaatggagagaatgtaagaaatctccttcattagctgctg

SEQ ID NO: 8379 - DNA, 200 bp, Lawsonia intracellularis
aaggggaggtactttgtgatatttttaaaaattggggattatttccaagtttaagaggtggagcactctatagtaacaataaggtaattgcattttctataggtgaaactttggatgaaaatactgttgttgtccactttgaaaaagctaagcctggaattcgaggtgcttatcaggctattaataactgttttgtacgt

SEQ ID NO: 8380 - DNA, 200 bp, Lawsonia intracellularis
tatgaatgtaacgattttgattttattaatcgtgagcaagacttaggagaagaggggttaaaaaaagcaaaacaaagttactatccaataggatttttaaagaaaaattatgtaacagtttttcctgagtcttaatttaccttaaagtataaatttttttaaggaaaattattatgttcctttttatgaataaacgtttg

SEQ ID NO: 8381 - DNA, 200 bp, Lawsonia intracellularis
atcagatattcaaggtcgattataataacaaatagaatgtttcactagacaatattactattaagttaagtaaggataatagcatacatatggcgatgatagaaataaaagatattcacaaatggtatggtgaatttcaagttcttaagggtatttcagaacgtatagaaaaaggtgaagtattagttatttgtggtcca

SEQ ID NO: 8382 - DNA, 200 bp, Lawsonia intracellularis
tcaggttctggaaagagttcacttattcgttgtattaataggttagagtctattcaggaaggtgatatcctttttgaaggaaaaagtatttttgatcctgatgtagatataaatgaactaagaacagaagtaggtatggtttttcagcaatttaatttatatccacatctttctgttgtggataatgtgacattagcgcc

SEQ ID NO: 8383 - DNA, 200 bp, Lawsonia intracellularis
tataaaagttcgaggggtgagtaaggcagatgcacatgttttagcaatggagttgcttgcacgtgttggtattgattctcaagcattgaaatttcctggagaactttcaggaggacaacagcagcgtgtggctattgctagagctctagctatgcaaccaaaagtaatgctttttgatgaacctacttcagctttagatc

SEQ ID NO: 8384 - DNA, 200 bp, Lawsonia intracellularis
cggaaatgattaatgaagtattgtcatgtatgaaagatcttgcacgtgaaggtatgactatggtttgtgttacccatgaaatgggttttgctcgagaagtttctgataaagttatttttatggatcatggtgtaattcttgaagaaggtccaccagaagagttttttggtaatccacagcatgagcgtacaaagagcttc

SEQ ID NO: 8385 - DNA, 200 bp, Lawsonia intracellularis
ttaaaagagattttatcacatcattaacaattaatataacttattgagtaataatatttttatgtctaaactattatgtattgaaattattgctgatgatacacagttagatgtaattattagtattttatttcaatatattccatatggatgggaagaagagagtctttcaacaggtgaaacaatattacgaattcatt

SEQ ID NO: 8386 - DNA, 200 bp, Lawsonia intracellularis
gtgataattctgaagtaaagcatacagtgtgtaataaacttcaaagtgttttccctaatattaaaatccatgttaaagaggtaccaattcaagattggtctatagcatggagagattttttcactccagtaatagctgatcaatttcttattcttcctccatggcttttagatacaacaccaaaaagtgatcaacagata

SEQ ID NO: 8387 - DNA, 200 bp, Lawsonia intracellularis
attgttatagagcctaaatgtgcatttggtacaggacatcatgcaacaacagtattatgccttgaatctattagtcattgtgctaaaaaaggctatcttcagccaggaatgcggttttttgatcttggaacaggaacaggtattttaggtattgcttgttctttactagggttaacaggtataggtgcggatattgatcc

SEQ ID NO: 8388 - DNA, 200 bp, Lawsonia intracellularis
tatagctatttctaatgcatcagaaaacatagcattaaataaggtagaatctcaaatggtcattacagaagcaggagtagaagcaggtttaggagaatcttttaatcttattgttgctaatattcttgcagaacctttaaagtgtcttgcattagatcttatagagcttcttgctccttctgggaatctaattctttctg

SEQ ID NO: 8389 - DNA, 200 bp, Lawsonia intracellularis
gactacttgattaccaggctgatgatgtagaagctgcatactcaaaattaggaaaagcacaaagagttatttcaggtgaatgggtagcacttatatggaatagacaaggttagaacatctcaatctatctccctataagttaaccaactactctttttggtgattatcaactgaagactcttggtttgattgtgggtgag

SEQ ID NO: 8390 - DNA, 200 bp, Lawsonia intracellularis
cttgtgttgtgttggatgaattttcaatttgtacatcaagaattgttgattgattagctgaattagtattagtgataatattgtagcttagggatgtaataataaatataatagcaagaaatgctgttagttttgtaagaagtcctccagctcctgaacttccaaaaacagacgtattaccgccaccaaaaatgactccc

SEQ ID NO: 8391 - DNA, 200 bp, Lawsonia intracellularis
atgccttcttttccagattgaagtaaaacaataatcacaagaagaatacaaactattagatgtagggaaagaatgagagtattcacaataaaagctccttaagcaaaaatagaagttctttttatagaactattgatagatggttagttttaaataattaactatgtattttaagtggatactattcagaaaatccagca

SEQ ID NO: 8392 - DNA, 200 bp, Lawsonia intracellularis
tgtataattttcataaaagattctgcttgtaaagaagcaccccctaccagaagaccatttacattgtcaagttctagaatagaagaagcattttcggagttgacacttccaccatatagaattctgatgttttggcttgtattacctatcatattatgtaaaatttttcttattagagtatgggcagttataatatcttg

SEQ ID NO: 8393 - DNA, 200 bp, Lawsonia intracellularis
ttgagaagcaacttttcctgtaccaattgcccaaactggttcatatgcaatgacaagttgtgaaatagcttttgaaggaatatctgtaaggcttgttctcaattgttgctctaacacactgttaacaagtccagcttctcgttcttgtgcagtttctccaatacatagaatgatagaaaatccatatgataaagcaagtt

SEQ ID NO: 8394 - DNA, 200 bp, Lawsonia intracellularis
ttgttttttgttcaataagtgtaggtagttcacctataatatgacgacgttcagaatgaccaataagaacccatgagcagcctacatctttaagcatttctaaagaaatttctcctgtaaaagcacctgaaggggcaggatagaaattttgtgctccaatgacaatagtagaattttttaatttttcttttattgtatca

SEQ ID NO: 8395 - DNA, 200 bp, Lawsonia intracellularis
atagcaagaaagggagggaaaagaacaatatctctttggggaggaatcccttctggcatagacataagtttttcaatcatatcctttgcttctagccggtttttattcattttccagtttgctgctataagtattttcatgaaaactccataaaaaatattacaaaatatctgatgtaactttttttgaatatataaggg

SEQ ID NO: 8396 - DNA, 200 bp, Lawsonia intracellularis
catcttcatttgtatcagaataatatttctgccgtattcctgtttgaataaaaccaaaactcttataaaaagcaatagcggaatcgtttgttgcccttacttctaatattattttgaggataccttttttagcagctagtcgcaatgctgtattaagcaaaagttttccatatccttttcgttgcatttgctttgctact

SEQ ID NO: 8397 - DNA, 200 bp, Lawsonia intracellularis
acaatattaatgacttctaagtaatcctggttatagtaaataaaaatatagcctataagttttttacagtatgtttgtacaccaaaagttttatatcctttttgtttgagaacatttacaaattgaggtatattccatgtatgtgaagtatattgtttttctagagcaagaatttcaggtaaatcagaataggtaagagg

SEQ ID NO: 8398 - DNA, 200 bp, Lawsonia intracellularis
tatacatttctgtgtgtagattgggtccatatgaataatattttttatccaatagatgcttttaataacgataaagcaccagttgtagaatttatagacgctgactgcaagactttgattattgcacctataacacatgcaccaaggcttaagttgggatataaagttgtttgggtacagctttttgactctaaccgtcg

SEQ ID NO: 8399 - DNA, 200 bp, Lawsonia intracellularis
tatatatttaagtcgtagagcatcacatcttgtaacttatcctaacttgtgggatttctcagctagtgggtatatcctagcaggagagtcatgcgaggatgctgctcttagagaacttctcttatgttttggaatagataaagcttcattatctaatcctagatcctattttttccctttgcaagagaattttattcttt

SEQ ID NO: 8400 - DNA, 200 bp, Lawsonia intracellularis
ccacactatatacagtttctgttatgactacttctattcatttttgttatgactatatacaagatgggatgttcttggatgaagatgagttaacaggatttagctcagaattatcagaatttttgacaccatcattattatgggcaattcataataaaataattttttgagaaaatagtactaatatataatagatagtt

SEQ ID NO: 8401 - DNA, 200 bp, Lawsonia intracellularis
aatattttgttaggttattttattctaagagtagttgtttatatctagcgatatcatcaagtgttgctcctgctccatttattacagttgttaagggagttctgtccacattaacaggcagtcctgtaaggtttgttatacaagtgttaagaccttgaataagagaacctcctcctgtaagtaatattccttgttgcata

SEQ ID NO: 8402 - DNA, 200 bp, Lawsonia intracellularis
atatctgcggaaagctcaggtggtgtttgttctaaaacatcaagaattgatttaagtataatatcaataacaggagtaatagctttttggacatgtgtatgatcaagttttaagtttgttggtccactatttgtgatatgttttccagaaatttccatagtgagaggctctggtggtgtttctagtgaacctaaagtcat

SEQ ID NO: 8403 - DNA, 200 bp, Lawsonia intracellularis
tttgattttttctgccatgatttctccaacaaatatttgcatatgctcttgaagataacgctggacagctttatttaatgcatcacctgcaactcttacagattgagcacaagctttttcacccatactaataacagcaatatctgttgttcctccaccaatatcaacaatcatactaccaattggttcaaggactggta

SEQ ID NO: 8404 - DNA, 200 bp, Lawsonia intracellularis
gactagcaccaatagcagctgctattggttcttcaataagtcgaacttcatgagctccagctcgtttagctgtatcaataactgctcttctttctactcctgttatattaataggaacacaaataatcatatgtggttttctaactaaccattttcctataattttttgtagtagattagctataagtgtttgagccata

SEQ ID NO: 8405 - DNA, 200 bp, Lawsonia intracellularis
tcaaaatcagcaatacaaccatctttaagaggccgaatgacttctatattgtgtggaactttaccaatatatgcatgagcttcttttccaacagcaaggacttttccagaaagagtatcgatagcaactgttgatggttcattaaggacaatcccttgtgactgaataaacacaagagtatttgctgtacctaaatccat

SEQ ID NO: 8406 - DNA, 200 bp, Lawsonia intracellularis
agcaatgtacttacgtttcataattattcttctttaatatgcgttatgggtgctgtatcaggatcatagaaaatagcgccacttctatggattgttgcatctggaagaaggcgattaagacgatatttcaatgcaactatattaaggtattgagcaagagatattgtagccattgttgtaaaaattctcatatcctgagg

SEQ ID NO: 8407 - DNA, 200 bp, Lawsonia intracellularis
aagaggtctggctgtacagcttgctaaacataaaacaccacatgtaattttatttatactaacaggcagacatatgatagactgaaattcaggtatataagatacctttccaaaaagaggagtagatgaaccatcagttccctcagcatatataggcacttcgttacggaatacccatcctagaagacctccattaacta

SEQ ID NO: 8408 - DNA, 200 bp, Lawsonia intracellularis
atgaaaattcaggtaaaggttttttgtgtggaagtactagtggtgaactttctccttcaacaaagtatgttgaagatccctctacgctagaaacaaaaacagaatagtcagagtctgtagtctctgttactatagcaagaaatagcgaaagaaattctttccaatttgtttgttcatgaagtttaaatagttgctctaaa

SEQ ID NO: 8409 - DNA, 200 bp, Lawsonia intracellularis
ccgtcatagtaacgccttagtctctgattattattagcattacccatagtatttatttgtctgactacaagttttgcaaatcgatgtaaaagttgctgatctacttcagtaaaaacgtggtttgttatactatcaatacaaagcgctcctcctccaggaaggtggcagcccataaaagaagtgataagtttttcatcgtt

SEQ ID NO: 8410 - DNA, 200 bp, Lawsonia intracellularis
atttgagtaatatcctagatacccttgtcgttgatcaaaattattaaggattaacggttgctgatggcgtaacacccatcctacaagacctttcccaggaggtataataaattcttctgtatagggttcacactctgttgaagctgagacaagagtaaagttgccatcctcagtgggtaaaaaaagggcaacgttatgta

SEQ ID NO: 8411 - DNA, 200 bp, Lawsonia intracellularis
cctgaaagacactacgtattaagtcaagaatattatcaccattatgattatcagtcattaggctctctttataggattctctaaaatactagattattaataactataaatagttgttactttttatatgaaagtactaaataacttatcaaaggcaagggcattcatgcaactatcttttcttggataaattagtgaat

SEQ ID NO: 8412 - DNA, 200 bp, Lawsonia intracellularis
aatttattatttaataattttattttatatctattaatgagttgtcaaaagtaatacagttgcttaacatatactctgtagtatctatatttgtttatagatatttatagtaatgtaatatattataaacattttaaatatattaaacttatatattttatatatggagtattcagttgacacgtgttattgtagttgat

SEQ ID NO: 8413 - DNA, 200 bp, Lawsonia intracellularis
gactctgcattttttagaagctctattactaaaatgctaactcaagattcagaaattgaagttattggagttgcaaaagatggtatagaaggtcttgagaagataaaaaaccttaaacctgatgttgttactatggatattgaaatgccaaaacttgatggtatttcaactttaaaaattattatggatgaaatgccatt

SEQ ID NO: 8414 - DNA, 200 bp, Lawsonia intracellularis
acctgtaattatggtcagttccttaacaaaagaaggagctgaagcaacattaaaagctcttgagtttggagctgttgattttatcccaaagtatccaggtaatagcttggcaagtatggacttagcagcactatcatcagatctgtgtacaaaggtcaaagctgttgcagcacgagcaaaacgctttccattaaagcgga

SEQ ID NO: 8415 - DNA, 200 bp, Lawsonia intracellularis
taaggaaagataaagtacctattatctctcctgtaaaaaaagatttttttacatcacctaatcattcagaaaggtctaggagagatattattgccattggtgtttcaacaggaggacctccagctgtacaaaaggttctttcagagcttccagaaacatttccagcttgtattcttattgctcaacatatgccagcagct

SEQ ID NO: 8416 - DNA, 200 bp, Lawsonia intracellularis
tttacaaaaccttttgcagaacgacttaacagtatgtgtaaaatttctgtaaaagaagccgagcatggtaatcctataaaaaatggcatagcttatgtatgtccgggtggaagacatttacgcttagacttgaaaggtgctttacctcagatttctgtggtttctgaaccatcaacagctctttataagccatctgctaa

SEQ ID NO: 8417 - DNA, 200 bp, Lawsonia intracellularis
tgttcttatggagtcagttggtaaaagcatgggtggaagatctgttggagttattatgacaggtatgggaagtgatggggttgaagggatgagagtacttaaatctaaaggaggatttgttattgctcagagtgaagcttcatgtgttgtttatggtatgccaaaagcaatagtagatggtggtcttgcggatgaagttg

SEQ ID NO: 8418 - DNA, 200 bp, Lawsonia intracellularis
ttgatcttgataacattgcggaaagggtagcttcggctctttataaataatatatctgttgagagtcattatcatgataaatcataatgtggaacagataacacaagaaattttgacacgacttgagagtgataagtcagatgaaattcgttctgcagcttttgaagcagctgaactaaaggcttctgacagtattcctt

SEQ ID NO: 8419 - DNA, 200 bp, Lawsonia intracellularis
tgttaataaaacatctccagagtccaaattttggagtacaggaagctgcagaatatgcaataagaaagattaggggagtagagacagtacaatctttaataccactattacggttagaagatgttgcaattcgtaatagcgctatagatattttacaagaaattggcgctgatgatctcaatactttatataaattactt

SEQ ID NO: 8420 - DNA, 200 bp, Lawsonia intracellularis
catgatcaagatgttgatatacgtatatttgtagctgatattttaggatctgtaggatcgttttcagctgtaagtatgcttatagaagtgctcgagaatgatacagatgtaaatgtacgttatcaagcatgtataagccttggtaagttaggatatagtgaagctaagggtgcattaagtaatgctcttgaaaaagacga

SEQ ID NO: 8421 - DNA, 200 bp, Lawsonia intracellularis
agattgggttcaatttgctgcagttgaagcacttacaaaactaaaggctaacgcttgtgtcgacattttgttagctgcactccccaaaagttctgactttgttgctagtacaataattaatgcattaggtataattgggaatatgttatcagtgcctgttctacttcaacaacttgataagagtacagggccgcttcgaa

SEQ ID NO: 8422 - DNA, 200 bp, Lawsonia intracellularis
atgctactgttaaggctataatacaaattattggtgctccgtctcttggtcttttaggagagaaagatttagataagctatatacataccttcttgttgcccttgaagatgaagatgaagagattgttcttgttgcgttcacaggtctttctttctttcaaggtaaggaagcaacaacacgtaaggtttttgagcgtatt

SEQ ID NO: 8423 - DNA, 200 bp, Lawsonia intracellularis
caaaaaatggactctcttcatgatgctgatcttttatcagcagccattaaatgtctcatagatgttggttataatagtgctttgaaagaaggaattttttctaaaaatgaagaagttgttaaagttgctattgaagtatgtggtagtataggtgaccaagattgtgtaggactttttattgaatctttttggattttacc

SEQ ID NO: 8424 - DNA, 200 bp, Lawsonia intracellularis
attagaactacagaggtttgttataaattatcttgttaatattgcagatacatctaatcttagtttttttactgaagtattatcacgacatacagatatttctattattaaagctgcacttctcttcttgggaaaacaattatcgcctgctttatcttctgatatactaagctatctttatcatccagatgttgaggtta

SEQ ID NO: 8425 - DNA, 200 bp, Lawsonia intracellularis
gaaaaacagcacttgaggcctgtctggctttgaatgatgaacagataaataaacaagttattgagttattttttaatgaagatccttcacttagaatgttagcaatatatgcaatgggtaaaataagtccagaaacatatgtaaactctttattattagctttaaaggatagttcaggcgaagtaagaagagctgctatt

SEQ ID NO: 8426 - DNA, 200 bp, Lawsonia intracellularis
gaatcattaggagagctttctaaaataactcctgaactctttgaatctatctcctctattgtatatgatgaatgcaaggaagtacgattagctttaattaatttggcaaaaaagataggaacacaacaatcattatcttttattatcaatatgttggaagatagtgatagttgggtggtgatcagggcaatagaggcatt

SEQ ID NO: 8427 - DNA, 200 bp, Lawsonia intracellularis
aattgattataaaacagaagaagtagcagtattagctatcattaatagattagaaaatgctgatgttcttgtgacaatgaagattattgaagcacttgggattataggtggaaagcttgctttccaagctttgttaaaccttattaatcatgagaaccctgatatccaacaagcagtttctgatgcattaagttatattc

SEQ ID NO: 8428 - DNA, 200 bp, Lawsonia intracellularis
aggaagagcaaggagaagatttttaatggcacttccaattgaaacaacatcacttcgttctagccctggaattacagacagcgagttcaaacaattacgtgattttatacatcagaaaagcggtatttttattgccgataacaggaaatatcttatagaaaatagacttgtaggacgtattagagctttaaatcttaaaa

SEQ ID NO: 8429 - DNA, 200 bp, Lawsonia intracellularis
gttatggagagtattatagttatttaaaatttgatcctaataggcaaacagagcttacatatctatttaatgcagttacaacaaatgaaacaagtttttttcgcaaccctcctcaacttgaagtatttcagaaggtggttttgacaagggttatagaagaagcaaaaaagagtggacgtaaaaagttgcgtatttggtcg

SEQ ID NO: 8430 - DNA, 200 bp, Lawsonia intracellularis
gcaggatgttcttcaggtgaagaaccctataccattgctattattatccatgaactattatgtactgaaattagtcattgggatattaaaattacagctaatgatttatctgagtcagtattatctatagcaaaagaagggttatattcagagtatagtttaagaacaacaccaaagcatattatagataaatatttcac

SEQ ID NO: 8431 - DNA, 200 bp, Lawsonia intracellularis
tagggaaggacaaggatatcgtataaagtctaatattaaatcacttgtttcttttggaactattaatttaaaagataaggttcaagtaagccgagttgagcgttcacaaatagtcttttgcagaaatgttatcatttattttgatgatgaaatgaaaaagcaggttatatctgctttttatgataatcttctgccaggag

SEQ ID NO: 8432 - DNA, 200 bp, Lawsonia intracellularis
gggagcttattattggacattcagaatcactacatagtattacaaaagcatttaagctagaacatcatacaggaacaatcatttatcgtaaacaagattagatggtaagtataattatgaaaataattgctattgctaatcagaaaggaggagtaggaaaaacaacaacagcactctcgcttgttgcagctcttacaaga

SEQ ID NO: 8433 - DNA, 200 bp, Lawsonia intracellularis
aaaaagaaaaaagtactttttattgatcttgatcctcatgtttgtgcatctgtacatttacgatattatccaaaagggcaagtcaataccttatatcaaatacttattgcaaatagggaagagcttcctcttatatggtcaaaggttattttaaagagagacagtcaagcatgggatgttgtttctggagatactagact

SEQ ID NO: 8434 - DNA, 200 bp, Lawsonia intracellularis
atctgaaatggagagtatattgcacccttttaaaagaaaaggttttattttgaaatatgcgttatcattattatcagataaatatgattttattattatagactgtcctccacagtcaggagtgttacttataaatgcattagtagctgcagacttattacttattcctattcagactgattttttagcgttacatggat

SEQ ID NO: 8435 - DNA, 200 bp, Lawsonia intracellularis
taaaattactttgtgatactgtgaaaataataaataggagactacaacagccaataccgtatcgtgcagttgcaacaatgtatgataagcgtacgaaagcttgtagacatatattagaagtattacaattaaagatgaaaaatattatgttttctactgtagttcctatagatacaaagttaaaagaagcaagtacagca

SEQ ID NO: 8436 - DNA, 200 bp, Lawsonia intracellularis
ggaaaggttatttttgaatatgatgctttttctagaggagctttggcttatgagtcattggcagaagaagtagtatcattatggtaaaatctccaatggaatattttgaagagcaacttcttgattttagtgatgttgatactaatggagtggctgaagcagaacaatatatagtacagaattatctggggcaagatgaa

SEQ ID NO: 8437 - DNA, 200 bp, Lawsonia intracellularis
tttttagattcagagtataccacaatatcagaaaggggtagtggagaagaaagaagcattatacaagaggcgttagtaactaatgattatgtggttacagataagtatatccaaagcataccagaaattcagctagtaggttttcagcttggtagtcagttatattctatacctacagttgtagtacaggaggttgttag

SEQ ID NO: 8438 - DNA, 200 bp, Lawsonia intracellularis
aaaagtcccgatctttaaacttcctgcttcttcaaaggttgtttctggggttattaagttacgtggatatattacacctattgtacaggtatctagtttacttaatataactaaaaattttttaggtgaaggttctatgtttacacttatttgtaattacaaagcctttcagtttggtattccaatagataatattcatc

SEQ ID NO: 8439 - DNA, 200 bp, Lawsonia intracellularis
atatgtatcgagttattcatgaagatattcagtggagtgtagactcattattaggtgtggcaggagaatacattattggtttatttaagttatatgagaagcttatacctatattatctattgagcgtattattacagatgtattccaaaggaaggtgtaggaggggggaaatgagtaaacatatccttgtagtggatga

SEQ ID NO: 8440 - DNA, 200 bp, Lawsonia intracellularis
ctctaagactgtacgtaatcttatgtcatttgttttcaaaagcaaagggtatcaggttacaacagctgaagatggtttagatggacttgaaaaactttattctgtcgataaagtagatcttatagtttctgatataaatatgcctcggatggatggatttacttttataaaaagtgtccgtgagcaagatttatatagaa

SEQ ID NO: 8441 - DNA, 200 bp, Lawsonia intracellularis
atataccaattattattctttcgacagagaaagaagatgaggatataaaaaaaggtatgaagtttggtgctaacttatatatggtaaaaccagctcagcctgatacacttgtccgtaatataaaaatgttattaggttaaagggtaatctttgttttagtcttgtgcacattttatacaaaaggtatgttgttatgagcc

SEQ ID NO: 8442 - DNA, 200 bp, Lawsonia intracellularis
aagattttatggatcccgaactatttgctgacttcataattgaagcaaaagagcatcttgaaacaatagagcctaatttgcttgaattagaaaagtctccaaataacttagcattacttaatgaaatttttcgtccaatgcattcccttaagggagcttcaggttttcttggtttaaataaaatcaatcatcttgcacat

SEQ ID NO: 8443 - DNA, 200 bp, Lawsonia intracellularis
aaagctgaaaacatccttgatgagcttagaaaaggtgaaatggttattacatcagaaattatggatgtaatcctttcagccactgatgccttaagccaaatgatctataatttagaaaagacttcgtctgaaggggatgtagaaacagaatcaattatgaatcttattgatgccataatgagtggagaactaaatgttac

SEQ ID NO: 8444 - DNA, 200 bp, Lawsonia intracellularis
agcgacaatagttcaaccaactcaagatacagagagtaatactagtgaaagtaagacccaattaactacagtgctagaggctgttgatcagccagctactccagttcctttggagatgatagatgttagtcctgttaatcaagttgaaacaaaagttgaagctattccttcacatgaaaaaaaaaatagagaacttatct

SEQ ID NO: 8445 - DNA, 200 bp, Lawsonia intracellularis
tcccatgaatggattaacagtttagaacttaaagagtcatatgccctcatagcttttggggaaggacatctcaaagactttattgatgaagctgtagaaattacagaaaatttaactacaggacttttagatattgaaaaagacttaggtagtgatccagaaataatcaacgatttattccgttattttcataatttgaa

SEQ ID NO: 8446 - DNA, 200 bp, Lawsonia intracellularis
gggtaatagtggtattattggttttcatgaattgaatagcctcactcatgaagcagaaacattgttgaatcgagttagacatggagaaatggtagctactcatgagttaatcgatttgttacttttggttgtagatgtaatagatagtttagtagagcgtatagagagttctacaggtattgtacagccatttgatatct

SEQ ID NO: 8447 - DNA, 200 bp, Lawsonia intracellularis
cagagatccttgtttgtttgcaatctgctgttgcaggcaaagatataacattgcctaaagcccttattggttcattaaatacagtggattcattagagcaaaatagtattgagcatggagtggagactattgaaaatcaagtttcccagacaagcactgagtcttcatcagcttttaattcttcagataaagaaaatgaa

SEQ ID NO: 8448 - DNA, 200 bp, Lawsonia intracellularis
atagcttttgcagtaacggttaaacagcagcaatcaactatacatgctgcacttgaagcacttgctcaagatagcagtcagagagagtacattgatgctttatatcgttctttaatatctattcaaaatgctgcaggagttatgggttatgacgaattaaaagtatatgctgaaaggacagcagggcttgttgctcaagg

SEQ ID NO: 8449 - DNA, 200 bp, Lawsonia intracellularis
aagagattctggtattgatttttctctgatgctagacatcttaactcaagaagtagctattgttgacgacatgattgcagttattttagctggggacggtattacccaattatcttcttcaccaattgagcaaaaagaagttttatcaagtcaggatggtaatactactgatactgtttccagtactcctgttgtttcag

SEQ ID NO: 8450 - DNA, 200 bp, Lawsonia intracellularis
cagaacaccttacgtctttaaaaagctctagtctatcaacacaagaaagtcctggtcaaatagagtcacatgttccatctaaacctggccctgtattaaagactataagtaatgtaccaaaaaatataaaacctccttcagtaaaatcttcacaagcaaagcctgctaacgcaaatgatgctacatcagaacaaaaatct

SEQ ID NO: 8451 - DNA, 200 bp, Lawsonia intracellularis
tcatcaactattcgtgtagatcatgaaaagttagatcatttaatgaatttaattggtgaacttattattaatagaaatcgttatacaatgttagcaaggcgtcttgaagaacagggaactaatgcagatgttgttgaagtagcacaagatctttcagaaactacatatgcaatggcacgtatttctgatgaactgcaaga

SEQ ID NO: 8452 - DNA, 200 bp, Lawsonia intracellularis
cactattatgaaggtaaggatggttcctgttgcatcagttttttctcgtttcccacgcttagtacgtgatctttcaaggaaaagtggtaaagaagtagatttagttttagaaggtgaagaaacagagttagataaaagtgtggtagaggttataggagatcctcttgttcacttgattcgtaatgctgtagatcatggta

SEQ ID NO: 8453 - DNA, 200 bp, Lawsonia intracellularis
ttgaaccagaaagtgaaaggattgctcagggtaagtctactaaaggaaaagtgacattacgtgcttatcataagggtaattctgttgcaattgagattgaagatgatggaaaaggtcttgatcccgataaacttcgagaggttgctattaaaaaaggtattcttagtgctgaagaagcaaagttactagatgatcgtgag

SEQ ID NO: 8454 - DNA, 200 bp, Lawsonia intracellularis
gctatggaacttatctttgcaccaggtttttcatcagcagagaagattacagatatctctggccgtggcgttggtatggatgttgttcgtacaaatattaaaaatttgaaaggtagtatctctattttttctgaaataggtaaaggaacacgttttacactttctttgcctttgacattagcaattatagatgcattgat

SEQ ID NO: 8455 - DNA, 200 bp, Lawsonia intracellularis
ggtaaacgtagccggagaagtatttgctattccacttgatgctgtttcagaaacgacaaaacttgaagcatctaaacttaatgatattaatggccgtaaagcagtgactcttcgtggagaagtacttggccttattgagttaagtgagttactaaacttacctcaagaagagcatactgacgtactttctgttgttatta

SEQ ID NO: 8456 - DNA, 200 bp, Lawsonia intracellularis
tccacagtaatgaacgtcgccttggacttgtagtaaataaacttttagaaagacaagaaattgtcataaaaccattaggttcataccttggagatatcccatgcatttctggagcaacaattatgggggatggtggggtgattttaattttagatcctcatgagatttatttattaagcacttcagcagcaaagtcggta

SEQ ID NO: 8457 - DNA, 200 bp, Lawsonia intracellularis
tcacagtaatgctagtaataggtaatagataaatgaactgtaagtaatatctataaacctagtataactactagaaaagtacgttttatctaaaattttattaactaactaaagattattttaaagtctattataaaacctattgacaggttagtcattataggtataaagtctccctctctgctggaagatattttaaa

SEQ ID NO: 8458 - DNA, 200 bp, Lawsonia intracellularis
gaagtattagcagagttgttctttgacaagtgaagagtgagagggaacaagactttgagttaagagtcacggaagtgactatatagaaattgtgaattaaactggagagtttgattctggctcagattgaacgctggcggcgtgcttaacacatgcaagtcgaacgtgaaagtccttcgggatgagtaaagtggcgcacg

SEQ ID NO: 8459 - DNA, 200 bp, Lawsonia intracellularis
ggtgagtaacgcgtggataatctaccttcgagacggggataacggctggaaacggtcgctaataccggataaccattatggtaaaaagttgtagtgcaaagggtagcctctgtatgtaagctatcgcttgaagatgagtccgcgtcccattagctagttggtgaggtaaatgctcaccaaggcgatgatgggtagccgat

SEQ ID NO: 8460 - DNA, 200 bp, Lawsonia intracellularis
ctaagaggataatcggccacactggaactggaacacggtccagactcctacgggaggcagcagtggggaatattgcgcaatgggcgaaagcctgacgcagcgacgccgcgtgagggatgaaggtctttggatcgtaaacctctgtcaggggggaagaaatggatgggctctaatagggtctatttttgacggtaccccca

SEQ ID NO: 8461 - DNA, 200 bp, Lawsonia intracellularis
gaggaagcaccggctaactccgtgccagcagccgcggtaatacggagggtgcaagcgttaatcggaattactgggcgtaaagcgcgcgtaggtggttatataagtcaggggtgaaagcccaccgcttaacggtggaacagcctttgatactgtataacttgagtatcggagagggtggcggaattccaggtgtaggggtg

SEQ ID NO: 8462 - DNA, 200 bp, Lawsonia intracellularis
aaatccgtagatatctggaggaacaccagtggcgaaggcggccacctggacgataactgacactgaggtgcgaaagcgtggggagcaaacaggattagataccctggtagtccacgctgtaaacgatgggtgctaggtgctggggagttatcttcggtgccgtagctaacgcgttaagcaccccgcctggggagtacggt

SEQ ID NO: 8463 - DNA, 200 bp, Lawsonia intracellularis
cgcaaggctgaaactcaaagaaattgacgggggcccgcacaagcggtggagtatgtggtttaattcgatgcaacgcgaagaaccttacccaggcttgacatctgagggactcttaagagattaagaggtgcctttcggggagcctcaagacaggtgctgcatggctgtcgtcagctcgtgccgtgaggtgttgggttaag

SEQ ID NO: 8464 - DNA, 200 bp, Lawsonia intracellularis
tcccgcaacgagcgcaacccttatctttagttgccatcaagtaaagttgggcactctagagagactgctccggttaacggggaggaaggtggggacgacgtcaagtcatcatggcccttacgcctggggctacacacgtactacaatggtgcacacaaagggcagcaagaccgcaaggtggagccaatcccaaaaaatgc

SEQ ID NO: 8465 - DNA, 200 bp, Lawsonia intracellularis
atctcagtccggattggagtctgcaactcgactccatgaagtcggaatcgctagtaatccgagatcagcatgctcgggtgaatgcgttcccgggccttgtacacaccgcccgtcacaccacgaaagttggttttacccaaagccggcgagctaacgagcaatcgaggcagtcgtctacggtagggctaatgattggggtg

SEQ ID NO: 8466 - DNA, 200 bp, Lawsonia intracellularis
aagtcgtaacaaggtagccgtaggggaacctgcggctggatcacctcctttaacgaagaaaattcccattcactctttacttgcaaagagcaaagaagaaggcagtaagggcctgtagctcaggtggttagagcgcacgcctgataagcgtgaggtcgaaagttcaagtctttccaggcccaccataaggtgtgtctaaa

SEQ ID NO: 8467 - DNA, 200 bp, Lawsonia intracellularis
gttgaaagatactagaacaacaaggtaagacggaagaaagaggttgaaaggcgtgggggtgtagctcagttgggagagcatctgctttgcacgcagagggtcatgggttcaaatcccttcacctccaccagaagaaggaaggtcttgtctggtaagtttcgcaagatacttgtggaagtcatccaggagagacctgggaa

SEQ ID NO: 8468 - DNA, 200 bp, Lawsonia intracellularis
catgataaatgttcaggctctttaacaattgaatagggaatgaaaggaagttcttaagagacaagataataagggcaacaaggtggatgccttggcgctgagaggcgaagaaagacgtggtaagctgcgataagcatcggggaggcgctaaacatcctatgatccggtgatgtctgaatggggaaacccactgggagtaa

SEQ ID NO: 8469 - DNA, 200 bp, Lawsonia intracellularis
tgtcccagtatcattgactgaatacataggtcaatgaagctaacccagggaagtgaaacatctcagtacctggaggaaaggaaatcaaaagagactcccgtagtagtggcgagcgaaccgggaagagcctaaaccaaacagtttcgactggttggggttgtagggccgacatacgtgattctggagtaagcaggagaaga

SEQ ID NO: 8470 - DNA, 200 bp, Lawsonia intracellularis
gaactggaaagttccgccatagagagtgatagcctcgtatctgaacctgaaaaagacatagtcggtacctgagtactgcgaggcacgtgtaaccttgtgggaatctggggggcccatcctccaaggctaagtactcctcagcgaccgatagtgaacaagtaccgtgagggaaaggtgaaaagaacccctgtaaggggagt

SEQ ID NO: 8471 - DNA, 200 bp, Lawsonia intracellularis
gaaatagaatctgaaaccagttgcctacaagctgtgggagcatctttaagatgtgaccacatgccttttgcataatgagtcagcgagttaatctaacgtgcaaggttaagcgtaagtgtagccgtagtgaaagcgaggctgaataggccgtcagtacgttggattagacccgaaaccaggtgatctatccatgagcaggt

SEQ ID NO: 8472 - DNA, 200 bp, Lawsonia intracellularis
tgaagcaagggtaaagccttgtggaggaccgaaccagtaacggctgaaaacgttttggatgacttgtggataggggtgaaaggtcaatcaaacctggtgatagctggttctccccgaaatatattgaggtatagccttgggattgattaatggaggtaaagcactgaaagagctaggggtcctaccagattaccaaactc

SEQ ID NO: 8473 - DNA, 200 bp, Lawsonia intracellularis
tatcaaactctgaatgccatctaattgtatcccaggagtcagacggcgggtgcgaaggtccgtcgtcgagagggaaagagcccagaccaacagctaaggtctccaaatccatactcagtgggaaaggtggtggagttgtatatacagccaggacgttggcttagaagcagccatcgtttaaagaaagcgtaatagctcac

SEQ ID NO: 8474 - DNA, 200 bp, Lawsonia intracellularis
tggtctaatgattctgcgccgaaaatgtaacggggctaagtatggtaccgaagctttggcattgccgtaaggcaatgggtaggggagcgttctctataggctgaagcaaaatcgagaggttttgtggacagtagagaagtgattatgctgacatgagtaacgataaaataggtgaaaaacctattcgccgaaaacccgag

SEQ ID NO: 8475 - DNA, 200 bp, Lawsonia intracellularis
gtttcctgggtaaaggtaatcttcccagggttagtcggtccctaaggtaagggcgaaagccgtagctgatgggaaacaggttaatattcctgtacttgatacatagcgtgatggagggacgcaggaaggtaggcaggccaggtgttggaagtcctggtgcaagcatgtagaactgtctggcaggcaaatccaccagatgt

SEQ ID NO: 8476 - DNA, 200 bp, Lawsonia intracellularis
attcgagatgcgaacccgtgaacgtaagttctgaagctgttgagcctatactgccaagaaaagcttctaagcatatatgtatcaaaccgtaccgcaaaccaactcaggtgggtaggatgagaaatccaaggcgctcgagagaactctggccaaggaactcggcaaaatggccctgtaacttcggaagaaggggcgctttt

SEQ ID NO: 8477 - DNA, 200 bp, Lawsonia intracellularis
gggggtgaaaataaaactattggagctcctggaagccgcagtgaattggtggtggcgactgtttactaaaaacataggtctctgcaaagtccaaaagacgacgtatagggactgacgcctgcccggtgctggaaggttaaaaggaggtgttagcgcaagcaaagcaccaaattgaagccccagtaaacggcggccgtaac

SEQ ID NO: 8478 - DNA, 200 bp, Lawsonia intracellularis
tataacggtcctaaggtagcgaaattccttgtcgggtaagttccgacctgcacgaatggcgtaacgatctccacactgtctcggccagagactcggtgaaattgaagtcgcggtgaaaatgccgtgtatccgcagaaagacaggaagaccctgtgcacctttactatagcttgacattggattttgggcttgtatgtgta

SEQ ID NO: 8479 - DNA, 200 bp, Lawsonia intracellularis
ggataggtgggagccagtgaaacctatacgccagtataggcggaggcaaccttgaaataccacccttacacgtttaagatcctaaccctgaccagttagcctggcaggagacagtgtctggtgggtagtttgactggggcggtcgcctcctaaaatgtaacggaggcatgcaaaggttccctcagcctgatcggaaacca

SEQ ID NO: 8480 - DNA, 200 bp, Lawsonia intracellularis
ggcgttgagtgcaaacacataagggagcttgactgcaagacagacatgtcgagcaggaacgaaagttggcgttagtgatccggtggtcccgaatggaagggccatcgctcattggataaaaggtacgccggggataacaggctgatcgcatccaagagttcatatcgacgatgcggtttggcacctcgatgtcggctcat

SEQ ID NO: 8481 - DNA, 200 bp, Lawsonia intracellularis
cacatcctggggctgaagcaggtcccaagggtacggctgttcgccgtttaaagtggtacgcgagctgggtttaaaacgtcgtgagacagtttggtccttatcttctgtggacgaaggagaattgagagggtctttccctagtacgagaggaccgggatggacgcaccgctggtggttctgttgtcacgccagtggcatag

SEQ ID NO: 8482 - DNA, 200 bp, Lawsonia intracellularis
cagagtagctatgtgtggaagggataaccgctgaaagcatctaagcgggaagcccgcctcaagattagttctcccccctcgaaagaggctaaaggacccaggtagactacctggttgataggctggaggtgtaagtacggtgacgtattcagctgaccagtactaatagtccgtgaggcttgctctattttactttcttc

SEQ ID NO: 8483 - DNA, 200 bp, Lawsonia intracellularis
atcccctatacatattttgtcttggtgtccatggaggagggggtacacccgataccatcccgaactcggcagttaagccctccatcgccgatgatactgcatatttatgtgtgggaaagtaggtcgatgccaagacttttttataaaaaaggctctctatcagagagcctttccttttaacaaacacctctctacacaca

SEQ ID NO: 8484 - DNA, 200 bp, Lawsonia intracellularis
cacacacacacacacaacaactctctctacttatacataaatgctaacatcgttatatcgtcagattgttcagcttctcctctatgttctattattgtttgatttactgctgctattaatccctttaatgacttcttcctgttcatatcaagcgttttttcaaaacgttcagtaccataaagctcaagatttggggccat

SEQ ID NO: 8485 - DNA, 200 bp, Lawsonia intracellularis
tgcttcagtaactccatctgtatataggaagcatatatcatttttgtgaagttgagtttgattatttacatattcagcatgttctagaactccaacaattgggctttggtggctattatctaaagtagttataggtttatctgtagttgaattaatgatatatggtagacaatgtccacaatttacaaattctaatatac

SEQ ID NO: 8486 - DNA, 200 bp, Lawsonia intracellularis
cactttctggatcaaatattccaataaaaagagtaacaaacatatagcttggattattttttctaaggacttcatttatttcttttgctacttcagcaggagataagccttttcctatagcatagcgaataagagttactgtcatagacataaatagtgcagctggaataccttttcctgaaacatcaccaataacaaca

SEQ ID NO: 8487 - DNA, 200 bp, Lawsonia intracellularis
acttgctttccttctggtgaagtgaaaaaatcataaaagtcaccaccaactgcttttgcaggatcaagaaaagcagaaatgtcatagtgaggaacaagtgatgctgtatcagtcgtaggtaaaatacccatttggatatctctagcagcactaatttcacctaacatacgttcttttatagtggttgtttccattagttc

SEQ ID NO: 8488 - DNA, 200 bp, Lawsonia intracellularis
acggatattttgagtaagtgtttttcccatcatagagaaggctcgtgacaactgacctacttcatcagagcgttctattggtaaatcagctgttgcaagctcttcagcttctggtgaagaaaaatcaatttctgcaagagataaggctttttctgttaaggtttgtagtggagttattagcctagctgttaaaattagtg

SEQ ID NO: 8489 - DNA, 200 bp, Lawsonia intracellularis
tgacaagtaaactatttaaaatagcagcaagagcaatacctacaagttgatggataagggcacgtgttggggcttcaatttctgattgtggagctgctgcaacaatataccaatttaaagatttaaagtaggctacatggagaagtagtttttcatctttcgataatgaaataacttcttctgacatacttttattacga

SEQ ID NO: 8490 - DNA, 200 bp, Lawsonia intracellularis
gcttcttcaagtgttttttcagatataaaatctatttttttacctatattattacctttatgcgcaataagtgttccatcactatcaaatacagctataaagccatccttatgtagatcaaatccttctattttttctctaattgttttagcaagttgttcttcagcatcaagagcatttttagaaatatcagaaatatt

SEQ ID NO: 8491 - DNA, 200 bp, Lawsonia intracellularis
tatagctgttagaataatgtgttgatcttctggtgatggtaataaaaagacaaggataggatcagattttgaggaatttttattttcaaatactgtaaattctccattaattggtaattgttcataattaagtaatgattcaaatgaacgatttttagcatctttaaggttatattttgtttttaatgtggtaaataaag

SEQ ID NO: 8492 - DNA, 200 bp, Lawsonia intracellularis
gatcatttactagaggctttttattagcattataaacttcaatatgaatattaagctgttgtaattgtttgatccactcttggagaaaagtagattgctcttttgatggaaatttttctaatatatttagatttgagtccaacatcatagctatcctacgaagttgatttttactttgtagagtatttgttgcttgatat

SEQ ID NO: 8493 - DNA, 200 bp, Lawsonia intracellularis
gtaagaatatcaaagtagcgagcttcaagtccatctttaacaaaagatgttatacttctaaaagtttttctttctagctcaatattagacgagcgaaaatcttcataagctgaaaaaataataggaatggccgccatagaaatagaaacaatgactaataagaaaagtttcgttcgaagtgtgatacccatgacgtcacc

SEQ ID NO: 8494 - DNA, 200 bp, Lawsonia intracellularis
tttttgcatgatagagagactagttgtttgttactagtactatcgacaggagtgcaaaatatattagggctatttcatagtttttttgcatagtaactaattaatagttgttagaaataaaaaaatattattaattaaaaataattatgtcttttcctataaagatttggtatacccttagctaatgattataacataag

SEQ ID NO: 8495 - DNA, 200 bp, Lawsonia intracellularis
ttataacatagttaattctaatctgtagaaaaaaggtaaagaaatatgtaataggtagtaaataatatcaatatatttttccaacacttgggaataaatagtatttcttaaaaaatagtaaagaaattaatgcaatagaaagtatagtgtttaataaatagattggataaaataattagttagagttaggttaatcaaaa

SEQ ID NO: 8496 - DNA, 200 bp, Lawsonia intracellularis
attttcaaacggagaagttttttacgtaaaccttctcttgtaatcccaagtaattctgctgccttacttttattaccattagtttgtttgagtacacgaataatcagattatattccatttgttgtaaattaagagaatcttgtctttgtgatgtttctgatggtgttgttaggttctcttgtatatcttgggtattttc

SEQ ID NO: 8497 - DNA, 200 bp, Lawsonia intracellularis
ttcccattctttaatgattcgttgcgagagatcagatgactcaactgtatctccgattgtaagagcagcaacacgttccatctcattattaagttcacgtacgtttccaggccaactgtaagctaaaaattttttttgcacatcatgagaaagagttaatgctggacgatgcaattgagaacaatggtagttgagaaaat

SEQ ID NO: 8498 - DNA, 200 bp, Lawsonia intracellularis
tttgtgctaataagaggatatcatcacctctactagctaatggtggtagtttaatttctactacattgattcggtagtaaagatcctcacgaaattttccttctttgactgattgttctaaattgacattagtagctgcaataatttttatatcaataggaataggtttagagcttcctactcgtacaacttctttctct

SEQ ID NO: 8499 - DNA, 200 bp, Lawsonia intracellularis
tcaagtactcgtaatagttttgcttgatttgctaaactcatatcagctaattcatcaaggaataatgttcctttatcagcttcttctattagaccttttcggtaatttactcctgttgccacacctttttctattccaaacatttcactttcaaatagtgtgtctggtatggctgtacagtttacagcaataaagggtcc

SEQ ID NO: 8500 - DNA, 200 bp, Lawsonia intracellularis
tgcacttctaggagaactgtaatgaatcatttttgcaatgacttctttacctgatccagttggtcctaatatcaatgtattaataggatatcttgcaattgcttttgcaagttcaaggactttatgcatttcatcacattgtccaataattttttgtgattggtaattttcttgtatagttctacttaaatgtgtgtttt

SEQ ID NO: 8501 - DNA, 200 bp, Lawsonia intracellularis
gttcagcaagtattttttttgttgattcaagctctttattttgtagttgaagatcattaataagtttagcttgttgtaagttttttgcttcaactttgactaacattagaccaaaagcttctgcaagcctcataacttgtgttggggcagctccatgtttggtaagagtaaaaagtttattttcgtcaacaggtttttcc

SEQ ID NO: 8502 - DNA, 200 bp, Lawsonia intracellularis
caggcaatagattcacaaagatctataagggtttcataaaatataaactcattaaagacagtttcagccattttaatgattatccttcaatcattagtgaaacatacattttaagtaatgcttcattatctataagtggctctaagtcatgttgtaaaaagttttgtatttctatttgattagattgactaagattttct

SEQ ID NO: 8503 - DNA, 200 bp, Lawsonia intracellularis
ttacatttttggagattagaagagaaaacagatggaataagaagtcctccatctcccgcatctgggcaaatcgcctcttctaatacagtttgaatattagagggagcataagtggcctctaaacttgtagtggttaaactagtagatgcaagtgagcgtgattggggtattgtaggttctggtgtttcttgaggtccaag

SEQ ID NO: 8504 - DNA, 200 bp, Lawsonia intracellularis
aattgttccaataccaatactagcatcaagtagggaaacccttttcatgcattactccttactcagatatagttattaagtacatattgctacccatttagttatatttcaaagtttgtaattatgctattttattttaatgtactattatacccatctatgtataagttaaatttaacttatctagtatataatataga

SEQ ID NO: 8505 - DNA, 200 bp, Lawsonia intracellularis
ctgtagctagttactttatctagttaaatcattataggagatttttactatagatctaataataatctctttttcaataagtatattatatcttaataaattttatataatattgatttagatttcatattaccattcttatagttgttattgtatattattttcatctggttgtagtggtacatcaggatgttcttttt

SEQ ID NO: 8506 - DNA, 200 bp, Lawsonia intracellularis
gaaagaggaattcatcttctcttcttacagcatcgtcaacagcatcttgtacagcacccataactcttacacgattttcgacattatcaaataccataatgggaaattttcttacagcagctaacatctcttgtaaaaaaaggacttctttttcaatatcttggggatcagcttgatcaacaattttatctatagaggaa

SEQ ID NO: 8507 - DNA, 200 bp, Lawsonia intracellularis
ggagaaataaaattttcattttttagtgcaattagttcacgcatcatttctaaaggagttagtgtactattttcccccccacctttatgtttctctttccacctgctaagggctgtagtacattgtttatgagagctatgaagttgttgtgttttttcaatatcacccattacactttgaagatgtactttatccatact

SEQ ID NO: 8508 - DNA, 200 bp, Lawsonia intracellularis
tggatcagctgattcaagctctccaccaagtgtagatagaaggaaatcaatggctctatccagatcatcatcactctcatattcttcaagaagtcttgctaacactgcatcaggtgcagctgttatagttactgttgttgtataaagatctcttaactgtgctgcactgcctatatcagtaaattcttttgaatttagag

SEQ ID NO: 8509 - DNA, 200 bp, Lawsonia intracellularis
ctccttttagtcctgctttaatttcatcaccaaactcattttctaatgtctccatagcatctaatacagattttaatcctgttggctgtggagattctgcaccatattcttgtgcaatttctgcaagagaagcccaagcatctgttttattagaaaattgttctaatgttttttcgagtacatcttgtgaactttgactt

SEQ ID NO: 8510 - DNA, 200 bp, Lawsonia intracellularis
gcacgtaatacctgggataacatagctcttttagcattacgggtatcatcattcgtcagctctgtatattcttgaaccatttttaatagagaatcagatcctttcccttgtcttttacgatctttaattgcaaagtcgtcactgcttttagattcaagagaagttgttaattcttctgaagcattatcaatcatggactg

SEQ ID NO: 8511 - DNA, 200 bp, Lawsonia intracellularis
aggtgtttttatttgtgtgagattacgaccgttcatactaccggtagctctattagtattaccagcagctgcattggtcatttgatttgttgtggaaagtaatcgtggtgcagggattccactaacattagccataactatctcctaacttatagtttttcccacagtaataacaataataaataatagaagttaactta

SEQ ID NO: 8512 - DNA, 200 bp, Lawsonia intracellularis
gccacatagttctttatttaagatgatactactttttacgtgtattagttataactaaataactttattattgtatcaaaaataataataaattacacaggataattaataaaaatttttatatttcagccaggttaataaatagatgttattaagttctttaatctcagtatattatttggttagtatagaagttacta

SEQ ID NO: 8513 - DNA, 200 bp, Lawsonia intracellularis
actaacctagtgtaattctacctgtatagtttatataattatgtaaccttattaaggaagttataattttaatatatttattttatattgtagtatagagccaataaaatagtatagtaataatatataatttaggtattttttaataaatgtgtagtaaaatcatattttatttttaacttattgtagttattaagaaa

SEQ ID NO: 8514 - DNA, 200 bp, Lawsonia intracellularis
tatttagtttaatttctctctatctaaatttaatctatctaaagtaagaagtaatttacttattagtgaagcagttattatttgttactagtattattatccaagtaattttttctatttattttaataaaaatattcttagttaagctatctctttgaaaaagaagaggtattatagtaatattattgctacttacttt

SEQ ID NO: 8515 - DNA, 200 bp, Lawsonia intracellularis
tttattattactacttactttttaatgtttatattataataagtcaggttgcaaatacaacaatgatgataataagtaatataaaataagtactaactatataatagttaaaataaaatgaatatattttgttcttaaaagctacttagtttattttgatttttaacattgtttttactggtggaggaaatataatgtct

SEQ ID NO: 8516 - DNA, 200 bp, Lawsonia intracellularis
gattcaacaaatttatcttcttttggattccaagggaatagtatgaatgactttacaaactcagaggaaatgtcacaaccttctgaggtacaaggtaattctaaagaagttaggagtaactctgaaagaggaatacctcgaattacagtagatcctacaaagaatccaaccccaatgtttcgttatgctatgttagaatt

SEQ ID NO: 8517 - DNA, 200 bp, Lawsonia intracellularis
agttactgctaggaatatacgtgaatcagcaacatctctaatgaatagtatagcagatacacagcgtgaacaaaaagctgcaagtagttaccttgatcagtttcgaaagcatcaaagtgatgttagccaaggtcatggtagtggtagtcaggggaagtgggagcggatacaacagtggcaagttgattggttaaaatccc

SEQ ID NO: 8518 - DNA, 200 bp, Lawsonia intracellularis
ataatataaaatatccatctaaggttgatacaggtgacacatggcttaatgctgatgagtgggatctgatatgtaaaggaacccaagcttacatagataatataggctcaagtacacagcaaaaaatggttcaagctcaagatgcgctaggacagtataatgctcaagttcaaggagcaacatcaagtattactaacgat

SEQ ID NO: 8519 - DNA, 200 bp, Lawsonia intracellularis
attgagttgagtagatctgtgaatactacacaacctttctaatgtaatgtattgaattgtgtagtgttagagtttgcataagctaattaattgaagaagttagttggctttttaaaaagatctatcaaaaattttttatttattattgactaaaaagtaaaggtaataaaataagcaagtaaataatatgtactatagtt

SEQ ID NO: 8520 - DNA, 200 bp, Lawsonia intracellularis
tctttaagaaagaataacttatctttgttattttgtagcttattaatttattgtctctatcttttgttatatgagtatctcaatcttgtcccttttattagtatatagcaacctatctgagtatacattatattagttttaaaaaatattttttatcttatttttgatatgcttaactaacttatttaagtaattcatct

SEQ ID NO: 8521 - DNA, 200 bp, Lawsonia intracellularis
agcaaaattagattagatagttttttaggaattataatacacttattacttttattatttattattttattataataaggtagtattatctccaatataaaatttgaggaggtgttctatgagtataactggtgtatctggggcaactggggcaactggtgcagctgatgtaactggaacagcagcacctaaatttgcag

SEQ ID NO: 8522 - DNA, 200 bp, Lawsonia intracellularis
tagatcctacaaagaatccaaccccaatgtttcgttatgctatgttagaattagttactgctaggaatatacgtgaatcagcaacatctctaatgaatagtatagcagatacacagcgtgaacaaaaagctgcaagtagttaccttgatcagtttcgaaagcatcaaagtgatgttagccaaggtcatggtagtggtagt

SEQ ID NO: 8523 - DNA, 200 bp, Lawsonia intracellularis
caggggaagtgggagcggatacaacagtggcaaattgattggttaaaatcccataatataaaatatccatctaaggttgatacaggtgacacatggcttaatgctgatgagtgggatctgatatgtaaaggaacccaagcttacatagataatataggctcaagtacacagcaaaaaatggttcaagctcaagatgcact

SEQ ID NO: 8524 - DNA, 200 bp, Lawsonia intracellularis
aggacagtataactctcaagttcaaggagccacatcaagtattactaatgatattgaattaagtaggtctgtaaacactacacaacctttctaattgtttatcttattctaatgcaaatattattttatctttgttaaaaaagtaaagaaaaaattttattttttagtagaaatagtaatagagctaaagtaatcttaga

SEQ ID NO: 8525 - DNA, 200 bp, Lawsonia intracellularis
gaagaatcatactaataataattagaagaaattagagaggatacaacaggtatatgtagactatttatttattatttataatgtagatatccatctaaagctaatagcataaaaaataagttaacactagaaaggttaatattacaacatgttatattcctatgtaaataataaaaaatggtttggatgcaaggtgcatt

SEQ ID NO: 8526 - DNA, 200 bp, Lawsonia intracellularis
ggaacagtatacagtaaagttcaataagtaacagtaaatattattagtattagcggacaaagtaacactaattgaatagcaatcagtctatattattagaatttaataaaaaaactgttcaagactagtaaatattaaatatagtattatactatagtaataggtagtaaaagattactaataatagactatggtattta

SEQ ID NO: 8527 - DNA, 200 bp, Lawsonia intracellularis
tttttagttagttactattataacctcttaaaaacataattaacatttttataatttcttttgtattatatcatattatattagtagctattagtatatattacgtcatttttattatatactcttttatgagtaaacattgttcttttattgtttataagtgtagtaatatatctaactgtcaatttattgcatgataa

SEQ ID NO: 8528 - DNA, 200 bp, Lawsonia intracellularis
aaatcgtagtatataatcaaaagtgttgatatctagttagtattgttaatctattttagtttaactattggtatactctttgctgatagatttttatactttttaacaaacataacttgatattttaatgccttaccttactgtagttaaatagtaatagtatattaaaaaaatattgtaactttagatagttattttta

SEQ ID NO: 8529 - DNA, 200 bp, Lawsonia intracellularis
gttagggggaaataattatgagtggtgttgctcctgttggcgtttttccgttacctaatcctgataattataaagataaccctgtggcaatgtatgcatttgttttgctactttatgctgatagttaccgtcaggcttctatgaataaaatggacgaactagaagtacttcaaggtgaacagaaagaagctaatgatatg

SEQ ID NO: 8530 - DNA, 200 bp, Lawsonia intracellularis
ataggatcatttaatcaaaaacttagtgaagtagagaaagctggtggtggcggtgtcacacgtccaatgacagcagcagaaaaagcatggtgtgataaaaatggtattaacgtccctgggtatccaaatcttaatgcagagaactggactgctgtaattaaagatacccagaaggttgttgatacaaaaagtacagatat

SEQ ID NO: 8531 - DNA, 200 bp, Lawsonia intracellularis
tcaatctactatgaatattattaaagaggctacaggtcaatatagctcattcatgcaaggtacaagcactaatgtaactgcttctaatcaaatgttaaactctatagcaaaaaatatagcttagactttattagtctatataacagtctattttatttattctttatttattttgtctcatcagatatttttgttaattt

SEQ ID NO: 8532 - DNA, 200 bp, Lawsonia intracellularis
caacatactcaaatagagtaatagaacatatctattaatttgtgagagaggaaaggctaaaagtatctgatgaattttattttctattgttgttttaatggtgattactattatttaacatagaaaaatatgctttgtattttatttgttataatagtttagttgtttttaaactagctttaattgtcagagaggttttt

SEQ ID NO: 8533 - DNA, 200 bp, Lawsonia intracellularis
ataaaaatgtaatggtagggggtagaggttattttttagcgtcaacaaagtttttatttagccaaccttgttggcaattacatatgtcaatagtacgtcttaataatcaaaaaaagtataactagctgataactaatgtttggcatagtctctgcagtaaaaaagacattacgacggaggcgttgtgccggttagttcat

SEQ ID NO: 8534 - DNA, 200 bp, Lawsonia intracellularis
gctaatatacatagacttagatgatacaagccggctagaacgccataatagttccaaaggtttaaatgattgttgtgaagagtatatgtttaatataagccattgtaattataacatttccataaaggagaatggttatgaaacaagagcgtcaagaaacacaggctgctacatctgaggctccagttatgggaactgat

SEQ ID NO: 8535 - DNA, 200 bp, Lawsonia intracellularis
aatgatatggaacgtgtagaagctattatggatgccttgtcaacaggttcatcgattggtgacatcattgggataacccaagaacagatggatgtgttatataccattgcatatggagcatatcaggcaaaaaactatcaagatgcagaaacgctcttccaagccttgtgcttatatcaacatatggatgaaagatactg

SEQ ID NO: 8536 - DNA, 200 bp, Lawsonia intracellularis
gatgggacttgcaggaagccgtcaaggacttgaaaactataagggagcaatagaagcctatgaaatggcaggccttgcagggtcgctaggagatcccacaccatttctctatgcgggcatatgttatatgaaattcggtgataaagagtccgcaagagttgcttttttaagcactgaagcactctgccaggagggtaatc

SEQ ID NO: 8537 - DNA, 200 bp, Lawsonia intracellularis
gtaagcatgatttagtgaaagagagagcaaaagctatgttggaaattctctctggaggagtaaagcaatgacaaattttggagatataagcggaagctccgcaagaatgagtagcttgatgactggtacatccggtgaagaaggacttgaagaacttgaaggtggtgttcctaaagagcaaggtggtccaggtaaaggag

SEQ ID NO: 8538 - DNA, 200 bp, Lawsonia intracellularis
atgcttcagaggctgctaaaggtcaagcagcagcagatagtattaattcagctggtggtactgaaaagcctggagaagttggtgataaggaagatgtaggggaaggtggcgaaatacctgaaggtggtgaaatacctgagggtggtgaagaagttccagaggaacccccatatgtccctcctccattggttgaaccagct

SEQ ID NO: 8539 - DNA, 200 bp, Lawsonia intracellularis
aaaatcagtacagtaacagatctcagtacgttaatgggatcactacagctgacagagcaaaaaaagaatgctgaaaaaacagtaaatgaaattaaagcacagaataaagagcaacaagtaaagttccaagagcaaattaaaaagattgaggataatattgctgaatctaagaaaagtggtatacttaagtttttccaaaa

SEQ ID NO: 8540 - DNA, 200 bp, Lawsonia intracellularis
gttgtttgcagttattggtgctgtactaggagctattggaggtgcgctagctattgctgcaggtgctgcttcaggtaacccattattggttgctgcaggtattatggctattgtagcttcaattgatgcagcaatgtcgtcgctatcggatggtaaagtgtccatctcagcagggattagtaaggctcttgaggctatgg

SEQ ID NO: 8541 - DNA, 200 bp, Lawsonia intracellularis
gagtaccagcagaaacagcacaatggattgcatttggtatacagttagcaatgattgcagtgactatagctattggttttgcctctggtggtggtggagcaatggctggagtgtcaaaaatagcagatatgttttcaaagtctcaagatgtagctaagttggcacagatgattgaaaaagcttctaaaatagtacaaatc

SEQ ID NO: 8542 - DNA, 200 bp, Lawsonia intracellularis
gctggttcagttaatcagtctgctataggcggtacaggtattggtacagctgtagtgcaaagcaatataaaagctaatgaatctgaacaaaaagaaattgaagctgctattgcaaaagttaaagctaagatagagacgttacaagacttctttaaaaaccaaatggaacaattcaatgctataatgaaaataataacaga

SEQ ID NO: 8543 - DNA, 200 bp, Lawsonia intracellularis
tattattcaagatagcgtcaatacaaaaatagctgttcaacgtggtgcacgtgagtaatacctttagtaaatacagtgactatactataatatataaattaataaattttggagaagactatcatgatttcattaaataattcatcaattcaaataccacaacaaaatatagaagaaagtacctcacaagaagtaacttc

SEQ ID NO: 8544 - DNA, 200 bp, Lawsonia intracellularis
ctcctctggtggacaacctgctaaagttgatggtgtatcaatccaagcccctaaggctcctgttacttctgcagctagtaacttagaaggagtacagcaaagagaagctcaagaaaatgttacaaaaatgggcttacctgagctatcagctcctaaaggtggtggttatgttcagtcaacagcagctatgtttgcagaag

SEQ ID NO: 8545 - DNA, 200 bp, Lawsonia intracellularis
ttacagttgatgctatgaatcagcaacgtaaagctgcgcaagacgtacaaaatagtgctcttgaaggaatggttaataagatgctggaagcagctaaagatataaaagaacaatctaaattaatgatggggttaggtatagcaagttctgttatgaccactgcaatgggatttgggggtactataggtggtgtaaaaagt

SEQ ID NO: 8546 - DNA, 200 bp, Lawsonia intracellularis
atgacagctaaccctggagtaggaacaacacctcaagcacaagttacttcaaacaagcttactttaggtaaggagattgctgaaggtataagaggtggtatggatactggtaaagagagtcaagtgaaatctatagatgctgatataagaacaactcaagcagaagaaaagaaactagaagcacaaatggaactagtaaa

SEQ ID NO: 8547 - DNA, 200 bp, Lawsonia intracellularis
gcaatttgctgaaaattcaaagaaccttgctcagcaagctctgcagattatgtcagaagttactagggatgctaatgcaacaacacagcgtattctggcgtaataatttatagaacaactaatatgaagttattgagaaataaatatagattgtaatatataggaaatagcgtgtaattctatatagacaaagctataat

SEQ ID NO: 8548 - DNA, 200 bp, Lawsonia intracellularis
agagcatgtatctaagaaggatacatgctcttttttatgtgtgatatatgtagtgacatatggaaaagataaaaagatctatttaaagagtacctcattaagaatattgctatttaataaataataataataataataataaagaaagttcaaaagtgatatatatatatattaaataatttatgattttatttatctta

SEQ ID NO: 8549 - DNA, 200 bp, Lawsonia intracellularis
ttatataatatagtattttattaatagtattgataatattaatattagtcatagattatcattataggaaattttatatattagatagttttttactaaaaggatgtatatagtttatttttaactctacttaattagatacataatttttaattatctagctatataaattattttttaaatatactattaataatata

SEQ ID NO: 8550 - DNA, 200 bp, Lawsonia intracellularis
ttaattatatcttaatttatatatttagtatagttatgtagaactatattttatatgtttataatataacaaaataaaaataagtttatctatgtatattaatatatttatttttatcatatagtattattttgtagtatttatttttttatatataatttaaattatactaactatagttacattaatatatatatata

SEQ ID NO: 8551 - DNA, 200 bp, Lawsonia intracellularis
ttataatagattatataaacattagtttaaaaattaaaattagtttattactaaatttatatttcatatatatatatataatagtaaaaatatattttttagtataacgtatgtttattactagttatgtattctatattaatttataaaaattaaaccatattattcataatatatctaaataattacataatatagta

SEQ ID NO: 8552 - DNA, 200 bp, Lawsonia intracellularis
tatacattctataactcactatgtatataataatatattattatttttaatagatattaaatatctattaatatatttattcacataaaataatttattatttttatatttgtattcatattatataatcaaattttgacatttactatatcttatttgccatagatataaagagttataataatttttattgataaaaa

SEQ ID NO: 8553 - DNA, 200 bp, Lawsonia intracellularis
atatatattatacttaaaaatcatatgttgtagttacagtagagctattatgttgtaatgtataatctgtgatccataatgttgaatatatgatttggctgtaatttgaaatattttgtcctaattactaggtggataggccaatgtggatacagtttgattattatatgaaaaatgctcttagagttattttgaaagta

SEQ ID NO: 8554 - DNA, 200 bp, Lawsonia intracellularis
ctcttttatatacttctatggagcattctttttatacacttagttagtgtaagcaaggctgaaacacttttttcttatttatatacacattattcagaacaagaaagtttaggtagtcttttgacagactttgcattcactcagggatatagtgctattatttcacctgctgttcgtggtaatgtcagtggtttttttaa

SEQ ID NO: 8555 - DNA, 200 bp, Lawsonia intracellularis
ggatgagaatccataccagtttcttgaaggtatgaggagtgcctttggtgtcatgtggtatatgttaggaaaaaccatgtacttttatacacaggcagaactgcaaagagtgtttataagtccacaagttatgactgttgaacgcttatatcatatattattaaactcttctgttatttcaccacagttacctattcaac

SEQ ID NO: 8556 - DNA, 200 bp, Lawsonia intracellularis
taaatggagatatgattatcctttccggtcctccacattacattgaacaagtattacaggctgtatctatttttgaggtttctcaattatctaatattaccatgcgtgttttcccacttaaatatgcatctgcagatgatattgttattcaaagtatggataaaactgttacagttcctggtattgctagtattttacgt

SEQ ID NO: 8557 - DNA, 200 bp, Lawsonia intracellularis
gcaatgcttaatggtcaacaagagacagcaacaacaatagttgaacagcctgcaactgtgaataagttaaacggagaaggacttgcttcaaagggtaaggaaaaaacagaaaaaggtaatgaggtaaaacaacaagcagctggcgttaatattatggctgatcctcgtatgaatgctgttgttattaacgatgcggcata

SEQ ID NO: 8558 - DNA, 200 bp, Lawsonia intracellularis
tagaatgccttactatgaggaagttattcatgatttggataaaccattagagcttgttgaaattcatgctgccatcgtagacattgattccgaatttaagagagaccttggttttacactacaacaaggaagttctaagaagagtatgacaatgggtggtgacttttctactactcaacaatcactaccacttgagatta

SEQ ID NO: 8559 - DNA, 200 bp, Lawsonia intracellularis
ctaaaggaactgtcgaaggcggaggtctaacatattctaccatttattcaaaaggggtagagttctttttagcacgggtacaagctcttgaaacagaaggtgaagcaagagttttagggaaaccttcagtacttactgtagataatattcaagcaacattggaaaacacaagtacatactatattcaagttcaaggttat

SEQ ID NO: 8560 - DNA, 200 bp, Lawsonia intracellularis
cagactgttgatttattcaaagttgaatctggtacggttctacgtgtgacaccccatattatatataataatgatggtacaaaatctattaaacttgttgtagctatcgaagataatcaaaatgataattcaacagatcctactgtaggttctaatgttgtactaccacctattaaacagacaagaattaatactcaagg

SEQ ID NO: 8561 - DNA, 200 bp, Lawsonia intracellularis
tgttgttaatactggccaaagtttacttataggtggatattactatgaacaacaaggtgttaatgataagggtatacctattctcaaggacatccctattataggatatttatttaaaacaaatacaaaaacatcaaaaaagatggaacggctaatacttattaccccaagaattataatgcctaatacagttacgccta

SEQ ID NO: 8562 - DNA, 200 bp, Lawsonia intracellularis
tacctgcacatgttgatgatccttcatttcatcgtagtgcagtacaggacacatatgatgatataaaacccaaaagttctacaggaggagggtgctctagaaaaagaagggctccagttattgaagagcagaggctaggctaatgagcaaagtagatggtattggtatatatgtgttttctgggccacatgttggtgcag

SEQ ID NO: 8563 - DNA, 200 bp, Lawsonia intracellularis
aaattattttaccagagggaagctatactattgggacaagtgactcttgtgatataattttgacagatatttctttagctcccagacacgctcagcttgatgttcatattggagaaagtgaaaatacaacacatttgactgttatccctttagaagggggtgtttggtctaataatcaagctgtgccagagtcaggtttt

SEQ ID NO: 8564 - DNA, 200 bp, Lawsonia intracellularis
caacctaaacctggagacttttggtacttagggaatacatcctttgggtggaacttcccaggtaaaaattggcaaaataaagcagcacaacaatatgctgaaacacttagccaagcagaaaatgataataataaccttggattagaaggtggaacaacacaaactcaggaacagaaagatgatttagttaagaaagtatt

SEQ ID NO: 8565 - DNA, 200 bp, Lawsonia intracellularis
tggagatacacatcctcaagatgttattagtaaaattgataagttttctatgggaaaactcattggtgtatgtctccttatcctttttttaggagctattgcaatttcttatcaaagggattctgtggatgaaaaaacacaagttgcatttttacagaaagtgctagaagataatggatttagtggtgtatcagttatcc

SEQ ID NO: 8566 - DNA, 200 bp, Lawsonia intracellularis
caggtgctcaacaaattattattcgtggagttgtacaaagtgatgttcaacgacaattaatttatacattggcacaaagtgtgcattctcctgtatatattgatgttggtgttcgtgatgacttagttaacgctgtaaaagctgcttttgcttctagaggtattcatatttctgtcaaagaattttcagatccaggtata

SEQ ID NO: 8567 - DNA, 200 bp, Lawsonia intracellularis
attagtatctctggatatatgaaagatggttttgttgaagagtggtcaatttctgctatgagggatgacattcctataccattcaagctggaaaagcatattgtttatgctaaagaggttgctgaagttttagacaaaatatttgcagaaaataaaattggttctttaaaagtgacgtatcttgcaggagaaatagaaat

SEQ ID NO: 8568 - DNA, 200 bp, Lawsonia intracellularis
agtagggagttttgatgaggaacgtactaaaaagctcgataaggcattagcagaaataaaaaaagagcttgatgtgccaatcatgtttaaaattcaacaaatcaagcctgctcctattacgtctgcacaaaagggtcaaccagttaaagatgaaagtgatgaggagtcatcagtgttaggaggatctgttataaaggggg

SEQ ID NO: 8569 - DNA, 200 bp, Lawsonia intracellularis
taacattattaccaataccatttattacattaagtacaggagagcgaatttttaagggtggggtattacctagtggttatacccttgattcagtttctttagacaagttgatcttttctaaagataatcaatataaagaatatccattgagaggtgcaaattgagtgagccatttatatccttatttgatgtagtagacg

SEQ ID NO: 8570 - DNA, 200 bp, Lawsonia intracellularis
gagatcctgatcatacaaaacttcgtactattaaaaatgattttgctgaaatgaagagtactgtaaaagctgctatggattcaggtttacctccagatgaaatgaaagttgctaatttactttatttagggattcagaggggaatggagattcttgaaacattctaattagttattttggagggctatatggctgttgaa

SEQ ID NO: 8571 - DNA, 200 bp, Lawsonia intracellularis
acaggtgttgttgctcaaagtaaactccaaaaaattcttagtgaagagagtgggttatattcacaggacccaagtggagcattgtctcagcctgcacctgaggatgttcagaattttcagaaaattctcgaagatgataatcaaccgcaattaaatgtaataagccctagttatcatacacaggctatagagccttcagt

SEQ ID NO: 8572 - DNA, 200 bp, Lawsonia intracellularis
acaaacggaaaatatagtacctgtggaggaggtgcatgaagtagaacagatagatttacctacggatgtgcaggatagagaaatagctataaataattcttcacagatggtagctgatcttaatacaggggtcattacaccagtggagcttcttaggttacaaaaagttgtaggagtagttcaaacacaagcagttacaa

SEQ ID NO: 8573 - DNA, 200 bp, Lawsonia intracellularis
ctacacaagtttctcaacaagttgaacaaaatataagtacttttcttaaagagtagaggttggtgtgtatctctatatggaaaatgtagctgattctaatataagaaagctaaaagtaatagaatggttgttttttcaaaaaaagactattgttcttttgcttgctataatattactttatggttgtaaagttgaggtgt

SEQ ID NO: 8574 - DNA, 200 bp, Lawsonia intracellularis
atcaagggcttaatgagatgcaggctaatgctatgttagcaaccttacttaaacacggaattgttgctgaaaaacaaaatacagggaaagctggttatactataagagtagataaaagtcgtcttgcagaatctttagagttacttcgtgaaagcggttttcctaaagaacagtataaaagccttggctctatattctct

SEQ ID NO: 8575 - DNA, 200 bp, Lawsonia intracellularis
ggagaagggatgattgcttcagcatctgaagatcaagcaaggttaagttatgctctttctcaagagttagcaggtactttttctagaattagtggtgtattaagtgcacgggtacatgtagcattggcaagtggcgatcaagagttagaacaacgtacacctgcatctgcggctatttttttacttcatacacctagctc

SEQ ID NO: 8576 - DNA, 200 bp, Lawsonia intracellularis
tcctgttgttaatcttgttcctaaaattcgtgaactcacatcaatgtctgttccagaattatctccagataaagtatctgttgttcttgttcctgtcagagaatctattacaattcctacagttgcttctctttcttctattggcggtatgtttttttctaatgggcatgcaacatatgtgttacttattttagctggta

SEQ ID NO: 8577 - DNA, 200 bp, Lawsonia intracellularis
ttactgtattaatgatggtggctttattatatcttaatattattttttggaagcatgtatggacagcatatagtgaaagtaaaagtaatacagataattagttataaggaagcactgtgttatggtaacgcaaaaaagatatacagattttccttcaatattgtttattaaaagtaatatgtttttcccagcacatggag

SEQ ID NO: 8578 - DNA, 200 bp, Lawsonia intracellularis
tacatattttacatgaaaaggatgtaaaagcattattaacagcaaatgattttcttgaagaaacagataaatatttaaaaaatgctactcaagagacagaaaaattttataaagaacaatatgcattaggatataatagtgggaaagaagaaggtagttttgaacatgcattaaaaatttttggaactattttttcttct

SEQ ID NO: 8579 - DNA, 200 bp, Lawsonia intracellularis
ataaagtttgttgaaaatatagaaacaacactagttcgtgtagtaactgaagcagttaataaaattgttggtgaagttgatacattgaaccatattaatgattggattcaaaaagacttattacaattacaaagaaaatatcagctcactttatatatatctcacaatgatgaaaaatctgttacaatttatattaatac

SEQ ID NO: 8580 - DNA, 200 bp, Lawsonia intracellularis
attatgtgccaacaagccacaattaaaaaattttttacacatagtgttagatgattccattaaacctggaaactgtagggtagaaagtgagctaggtaatgttgaagcaagcataaaaacacaaatgaaagctttggagcagtcattaggtgtttcaactgaactggaggtggaataataatatgagcaatacaaaaata

SEQ ID NO: 8581 - DNA, 200 bp, Lawsonia intracellularis
tcaacatactcctttggtgataagccaggatcaactattactggtggatttggtgctcaaaaaccaactagttctgatataaatttttttgaacaatctattattaagcatgatgattaccctaataactatgaagtaaaagaagataattctcaagaggaggttgaagaaaaaccaactactcagccacctaaagagca

SEQ ID NO: 8582 - DNA, 200 bp, Lawsonia intracellularis
agtgacagataaaacagaaggtaaagatgaagcctttatagaaaaagatgatgctataggtaaagataaagacaaaattccaggaaagggagaacctatagagaaagaagatggagtggataaaaaagaaccaataaaagatgacaaagttgtagcagtaaaaaatcatgaaaaagatgacgattcatcatctataaaag

SEQ ID NO: 8583 - DNA, 200 bp, Lawsonia intracellularis
atgatggattagataagcagattactccaatgatgttattatcaatggtttcaggaaaagatgatgaccttaaggtagcacatgttcaacaaataaactctccaactattgatttaacagaattagtacaaagaattatggttgcagctccttcaagtagtaataatggtgaggtaagaataacattagctcaaggattt

SEQ ID NO: 8584 - DNA, 200 bp, Lawsonia intracellularis
gcaggaacagacgtaatattaagaagagataaagaagggatgctattagtaaattttttggcatcaggtacagcagcatataatcaaattgcaaatgcacaagatttattgaaacgtaggcttgaagttgttgaaggtaagtcagttaatatagaaatatcagacaaacagcaggaaacagaaaaagtaactgcagtaga

SEQ ID NO: 8585 - DNA, 200 bp, Lawsonia intracellularis
gggtagtggaacatcaacaacaaatcaataataattagtataggatagttagaatggaattacctggttgataaaggcaggctaatggtacaaactacacaaaaattatttgagcctgcgaatcttttacctctaagtgcgcaggtctataatacagcttctatgtgtataagaccttggcagtttatgctccaagatca

SEQ ID NO: 8586 - DNA, 200 bp, Lawsonia intracellularis
attatgtactttagatttactttttcttcatgatccatttagctctgtatacacaatagtcattcattgtggagaggggagatgggttattgagtttggaaaagtgcctcctctttcattatatccatcttttaaagataaacctgaagtattatgtgttcctgaagaggtaaaacttgcagtttttgaattactgattt

SEQ ID NO: 8587 - DNA, 200 bp, Lawsonia intracellularis
caccttttttacatcaattcgaaaatatgatgggaactcctgttgagctagtttcaagtacactttctcctcccagtagagataatttttcagtagcttgttctatccctttagtgttacatgtagagggaaacgaaaatgagattccttttttggtaaaaatagaaaaagaaaatgacgcaatattgcttttatcacaa

SEQ ID NO: 8588 - DNA, 200 bp, Lawsonia intracellularis
ttacaggagtttcctttagcttatagtgatgttgggccattatctatttctgttggtattgaagttggatatacccagttaagtacacaacagttacagcaaatagaaaaagatgatattttaattccagatcagtttttcatacaagagaagaagatccagcttcgattttcaagatttttagcaaattgtacaatcca

SEQ ID NO: 8589 - DNA, 200 bp, Lawsonia intracellularis
aggagggatggcaacaattatggatgttaatgatgtaggatatccagaagaccaaggtaatggtggtgagcaatttgtagaaaatcatacagaggctcctaattcacatggtcaacaacgaacagcgagagctaattctggaaggcaatctggtcaacagtcttcaggtattgatgtatctggtctggatttaccagttg

SEQ ID NO: 8590 - DNA, 200 bp, Lawsonia intracellularis
tatttgaacttgaacgtcaattcatgacagtgcaaaatataggattacttgccccagggtatacgtttgctctatcagttgatgtccaagctcctgttactttacgtgtaaatggtaaggctataggggtagggagacttgtagatctaaatggttctttgggggtacaagttgtacaagttatgctctaaataaaacta

SEQ ID NO: 8591 - DNA, 200 bp, Lawsonia intracellularis
atatagttatatgatgtgtttattttaactacgttattatgataataacgggttgtaaggagtttccatgcgtgtgattagtgaagaaaataatggtgttatagttatttctcttgatgggagaatagatgcaacaacaacaacgttatttgaagatgcctgtaaaaaagcttttgaaactggagtgcctgctgttattg

SEQ ID NO: 8592 - DNA, 200 bp, Lawsonia intracellularis
ttaatatggaaaaagttgaatatatcagttctgctggattaagaggtgttttaacaatgctaaagctaggtaacggggcctctgtaaatttagttttttgttctttaggagagatggtcagcgaagtttttagaatttctggatttaactctgtattaacaatatatcctaccataaaagaagcattagctgcactctca

SEQ ID NO: 8593 - DNA, 200 bp, Lawsonia intracellularis
gtatagcggaggggcataaatggcaacacttactatcccttcagggattgagcagcttccacatgttaatgcatttctccggaaaagtattcctatggcttttaaaaagcgcattcatttgatagaacttgcagttgaagaaattttagtaaatatttttcgatatgcctatcataatgaaaatggaaatgctgaagtgt

SEQ ID NO: 8594 - DNA, 200 bp, Lawsonia intracellularis
cttgtcagtttgttaaacataatgggactccttattttgttattactattaaggattggggagagccatttgatcctttccaggttccattacctgatctcagtttagatattaataatcgaccaataggcggacttggtgttcatcttgttcgaactgctgttgacttatataaatataagcgggagagtgatataaat

SEQ ID NO: 8595 - DNA, 200 bp, Lawsonia intracellularis
gtagtggagctcttttttcagtttttagcagaaggaatgggtaataacaatatctctatttaattaattcttactatgtaactttattctttaggggatagtaactttagttatgttaaggattgtcccgctaaaatatacattatttgctataattaccctatttttttgtttttttgacacaacaaatatattagcta

SEQ ID NO: 8596 - DNA, 200 bp, Lawsonia intracellularis
atgaaatattaaaaaatatacaatatacaaataagatagctgagcaaacaatgttagctatgcagtatagagtaaaacaagctcgtacacctcagaaatatcatcctagtgagccaatatatgaaaatcttttagatcagatggatgtatatagtctttctcccagcgcaaaaaaaattgtattacatagaatgattcca

SEQ ID NO: 8597 - DNA, 200 bp, Lawsonia intracellularis
acatatgttaaggagaaggtttttcggggggaaataaaacttccttcagattggaaagaaatcatccaagtagccagtacaaaacataacttagatcctgctcttattgcagctgtaatacaggtagagtcaggcttttctggagaagctctttctcctaagggggcaaaaggattgatgcaactaatgccagatactgg

SEQ ID NO: 8598 - DNA, 200 bp, Lawsonia intracellularis
tttagaacttggggctacagatctttttgatccaatgacaaatgtagatgccggtagtcgatacttacgacagcaactggatcgatttggctctgttgagctagctcttgcagcttataatgctggtccaggtgctgttataaaatatggtggtattccaccatataaagaaacacaggagtttgtaaaaaaagttttat

SEQ ID NO: 8599 - DNA, 200 bp, Lawsonia intracellularis
ctgctttttaaacttataaaatgaaattttcttttaagagagcatagtaataaaaagtaggttgatatactttcaagttcttttttatagagtatgtacattgttgttttatgtgataatgtatattcataagagtaaaaatttttccagacaacttgtgatagcaaaaggagtctgaaatggaaactaactcaagctat

SEQ ID NO: 8600 - DNA, 200 bp, Lawsonia intracellularis
cggggttcggatgatagtagccttattcaacttgtaactttcaaaatagcaggtgaagagtttggagtagatatattaaaagttcaagaaattatccgaatgatgcctattacaaaagtaccaaatgctccactatttgtggagggagttattaatttacgaggaaaggttattcctgtaattgatatgcgtaaacgttt

SEQ ID NO: 8601 - DNA, 200 bp, Lawsonia intracellularis
tggtatgccttctagtgctcatgatagtcagacaagaataaaagttatggatttacaaggtcaagttgttgggtttgtagtagatgctgtatctgaagtcttacgtattaaagaatctacagtagaaccaccaccacctgttgttgctggagtaggttctgagtatatgcgtggggttggtaaactccaagatagattgt

SEQ ID NO: 8602 - DNA, 200 bp, Lawsonia intracellularis
taatacttttagatttggataaattacttactgaaagtgagctagaaactttgtcagcattatagataataataaagttggcttaattaagacatcacttgattcatataaattgatttttaaaaaagagacaacaaagtactttgttgtctctttttagctctattctttattcattagggacaataataggtgttaca

SEQ ID NO: 8603 - DNA, 200 bp, Lawsonia intracellularis
ttaacaatacgtccatctttttttacattgagaggagaatgttcttttagatagcttataacagcttctactggacttttttggatatctgtccattttatgtcttttaacattataaatccatcatgtccctcagtaggatatccattaattataacacgatatgttttattagggtccagtggctcatatttcccatt

SEQ ID NO: 8604 - DNA, 200 bp, Lawsonia intracellularis
atttaaatattcaatagattgaatgcgttcacctacaggtttttcagcatttaaagtgaatctgagtcctgcaacttgaagaaaagttcctgcaaaggcaaagcaatgtacttttgagactccattttctatagcttcctgaattatttttcctgtaacatctcctacataaagtttatcttcaataggtatagctgtaa

SEQ ID NO: 8605 - DNA, 200 bp, Lawsonia intracellularis
caacatcaagtttttgtacaagccctataggtaaatttcctcttattaatccagtggttacaattgctatttgtgctccatttgagcggcctgcttctaatattgcatcaagaataatattagctgttaatccctcttgttttctacagtaaaagaaaggtttttcgtctagttgttcatttgaaggttgggatgtatca

SEQ ID NO: 8606 - DNA, 200 bp, Lawsonia intracellularis
aaatttggatttctaggatgagctatttctccaacttttacttcaagcttttctttaataggtataccatagctatcaagcagttctgctatggatactatagcaggatcattactaattggcttatcaagacgtataacatctccattccatttttgagggataccttgttcatcaaatgttatattaatccttccaag

SEQ ID NO: 8607 - DNA, 200 bp, Lawsonia intracellularis
atattctagtttttcttttgctgttacaataagtacaggatgtccagaaggtgaatgttttactataggataaggcccataagcattagggtaggtgttagaaagcaaagtatgtgtatgacctcctacaaaaacagagacatcatcgactttactagcaagttccatatctacatttattccaagatggcttaacacaa

SEQ ID NO: 8608 - DNA, 200 bp, Lawsonia intracellularis
taattgtaaatacattttgtttttttatttcttgaattgcattacgtaatgcttgttcagcattagtaaaaatggcttgagagcatgctcttgatccagtggctgttgcttctgtaataagtcctatgataccaatacgttttccttcacgttctacaatggtccatggagtaattgatgattgcatttcaggatctgta

SEQ ID NO: 8609 - DNA, 200 bp, Lawsonia intracellularis
aaggtgaggtttgcaactacaacaggaaagttaagttgtcttatagcactaaaaaattcataacatccatgatcaaactcatgatttcctggtgacatagctacatatccaagtctatttaaaaactttacaaatgggagttgatctggtgtatttataaagtcagaatgaaaagctgttcctacaaattgatctcctgc

SEQ ID NO: 8610 - DNA, 200 bp, Lawsonia intracellularis
atcaagaagaatagtatttggtgttgattgacgaatgtctaaaatagattgtgctaaacgtgccattccacctacgcaatctggtgtagtagatgtgaagcaaggattacctgattcttttttaattcctccaaggtgagaatgtatatcatttgtatgaagaatagtaagatcaaagctccatacatcataaggtgtaa

SEQ ID NO: 8611 - DNA, 200 bp, Lawsonia intracellularis
catatgttaaaaatataagaagaagtgtgatataaaaaacatatatttttttgaacatattatttcctttttattatcattatcattatcattatattgtagtaagctttttttaagctaatagtactataggtaatatttaaagttagactagttaatcatactactgtaactatatgatgtctaattaaattagtaaa

SEQ ID NO: 8612 - DNA, 200 bp, Lawsonia intracellularis
cagttaggttaggttggatatgtatccttatcctgtgttcttattaggtttattcttatgtattctatgttagaaaagttacaagtcataactagatatagagtcctactggctatagttagccttattttaataatattatttggtggtattggtttttggttgtataagtcacaaaaaagctcattagactatgctgt

SEQ ID NO: 8613 - DNA, 200 bp, Lawsonia intracellularis
tacaaatattaataaagcacttgaagaagacaatcttgttttattaagtaattatgttgattttgattcactttcaaaaaattttgttcatagtatacttcagtattggtcaagttttcgtatagatgaatcacgtcagaaagagcttgaagataatgtacagcaaatcattctattagctctaaggcataatgataaaa

SEQ ID NO: 8614 - DNA, 200 bp, Lawsonia intracellularis
atcaaggcaataatattacttctgatagtagtattacttctattcagacgatagatcaaaaaatgccttttagctttttacctaaagattttttgaaacaacttaaagaaaaaaagtttactatttatagacaagatgaagatattgctattcttaaaacatctatagttcataacgaagctgaatatcatactgagctt

SEQ ID NO: 8615 - DNA, 200 bp, Lawsonia intracellularis
agtttacttgtacaacgagttgctggtaaatggcacattacaaaaattattaatgctgatgagttagtaaaattacatatggctgcattagataaaaaagaagatcagttgacacatgaagtagctgtccgtaatgactatattcgtaatgaaatgaataaatattatcatgtatcagagtgtaatgcttttgttataaa

SEQ ID NO: 8616 - DNA, 200 bp, Lawsonia intracellularis
aaaagaaaacagtaatgatgaggatgtccctttaactatttctgttggtggaattaatatgggaagtgaggtattacgttcagctggaatgcggtgttttctttatgatatacataaaaatattctagctgtcttacctcttacaatggctaagaatgtgtcacctggtgatttttttgaacaggagtggtatatggaaa

SEQ ID NO: 8617 - DNA, 200 bp, Lawsonia intracellularis
ttccagagaatgtattgggtcattcttttttattaatgaaagataatacaataagttgtgcaatagaagtaacaacagttattcttgcagatggaacatttctttatctcaccccaacaccagagaaagaaaggcttcatccataatgttattccttctccgttttattcttgctcttttattcataccactaggaataa

SEQ ID NO: 8618 - DNA, 200 bp, Lawsonia intracellularis
ctataagctatgcaaaagataccctttctgaccactcatcttctttgtcattaccaagtaaagcccaagtagttaatgaagtatggatgttgttattacaatctagagttggtgagttagaagcaattagctatgagctttcttcattgtttaaagagttaccaaatttttctcaacaactttcaaataatatacaagag

SEQ ID NO: 8619 - DNA, 200 bp, Lawsonia intracellularis
atagaaaaaaaatatcaacaatatagtgcaatggccaaagttagtcgaggactacctatagagctgtctttagtagaagagagattaaaaaggcttgataatcaattatcagtagttatgagtccattgctagatactctcaatattttaaaggtacgtttaaatgaagtttctttattagaagaagatgcaggtgtaaa

SEQ ID NO: 8620 - DNA, 200 bp, Lawsonia intracellularis
aacagaaaatttgggatcaagtaaggatttagatatttttgttaaaaatcttgcagaagtggaaaataaattaggaagattagagaaaagagttaatgaaattttgaagcctgcctatatgttgaggaataatattttagcagttcaaaggcagttgttagagattattccgtcattatggaaaagttattatcttgctc

SEQ ID NO: 8621 - DNA, 200 bp, Lawsonia intracellularis
ctacaggaaagatttatgaacctgcaagttggttaaatatttatgaaagtttaatgagttttaaagagacgttacttgtacgtatagccgcagagttgcctgaaagcaagcaagattggggaagttctttactaagattttttgttattttaattccattagttctcttattagtggttttctatagtttttctcggcat

SEQ ID NO: 8622 - DNA, 200 bp, Lawsonia intracellularis
tggtcagatgagttaaaaaacgtatgggggcatataagtaaacatagtttaatacttcttgcgttaggacttgcatttcatttttctgcctgggtaccagcaggagaaaattattttttattatctatgattggcactattataatgagtattggacaagtagggcttgcatggagcttgtatacattagataaatctaa

SEQ ID NO: 8623 - DNA, 200 bp, Lawsonia intracellularis
caagccaaagttttctcctttttggaaattacttattcccttctttggtggaattcttttattattatttaatttttcaggtataattcttacattgctatgggttggtatattacttgttagtttttattatgatcaaaaaaaatgtaagctagaagatagtttttctcttgtgaataacttattacaactacatatag

SEQ ID NO: 8624 - DNA, 200 bp, Lawsonia intracellularis
tgattttatggattacattgataatgacaatgcttggatggacaagaatatcaattcttctttgtatgagttatgctgcacttgcaatatgtattcaacaagctgttggatttgttagattagcaaacattatttcaaagtatataccacaagaaggctttcatggactttttagtggaatgctattggcagttgctttg

SEQ ID NO: 8625 - DNA, 200 bp, Lawsonia intracellularis
ccagcgattcttattctagcaatatctataacaggattatggattttagcatatcctggtggagcatatttaataacacatataacaaaacttgactttagtataggtaaggtatcttttagcttagtccaaatcttatttttagtaagtgcattttatataacacgttcttttgtttctgttggtcgtatgtttattgc

SEQ ID NO: 8626 - DNA, 200 bp, Lawsonia intracellularis
aaaccttcctaaacataatatgggtatggatagaacacttattggccctattcaaacaggatttacctatactctttgggcagtatttttcttttctacactatatatgctgggtgtaagtcttactagcctagctgttgttgctggtggtcttagtgtaggtattggttttggtttgcagaatattacaaacaatttta

SEQ ID NO: 8627 - DNA, 200 bp, Lawsonia intracellularis
ttagtggactacttataatttttggacaaaccttaagagaaggggatattattgaggtaggtaataatcttactggtattgttagaaagattactattcggactacattagtagagacatttgataatgcaactatttttgttcctaatgcagaattactttctggacggctcacaaattggacacgtaatggtcgtaca

SEQ ID NO: 8628 - DNA, 200 bp, Lawsonia intracellularis
gtaagaaaagatatcaatattggtgttgcctatgattctgatataggtttagtcatgggtttacttaaagaaatagctgataatcattcacaagttctccgctatccagaacctatggtagttttcagtgattttgcagcaagttcattgaattttattttacgtttttgggttggagatctttctcaagcacctgatat

SEQ ID NO: 8629 - DNA, 200 bp, Lawsonia intracellularis
tataacagatttacgtgtaattatagcaaaaagatttactgaaaaaaatattgatattgctttcccacaactagatattcatatacgtaatgatagtgtattagcattacgtagaatttctcctatggcatctagtgaattacaacctactaaaagtatagaggaccttccaggtgttactaataataagcctatcatag

SEQ ID NO: 8630 - DNA, 200 bp, Lawsonia intracellularis
ctaacagttagttacttattttatttacttatatgataggaacagagatctcctctttactaacttattatttatctatttacttggtgtacttttatttattttttttcataaactataagaggttagtttttatttatggttaattgctggtattgttatagacttgaaaaaaaagaaaaaagacttattctttatag

SEQ ID NO: 8631 - DNA, 200 bp, Lawsonia intracellularis
aggaataagtcagttataggctaatattaatgaataagcttcataatccttcattaagtttgtttattacattaatccactaaaataatatgatatttttattcacgttataaattgtttgaggtataattttgtatttgtattctattcgacttttatctattcaacctattgctattttgcgagctatgctcacttct

SEQ ID NO: 8632 - DNA, 200 bp, Lawsonia intracellularis
ggttggtttgttgatgcatttttatatttttttgaaggtaaaggtaaagtaacacgttccttcttatgtgtttgtatgttagttgttggaggaatgttttttatatttatatcaggtgctttccctgattatagaggtattgaaattcgtaaaccgttatctctaagttctttaccaataccacctcaaaaagatacacg

SEQ ID NO: 8633 - DNA, 200 bp, Lawsonia intracellularis
tcccctttcaggaagtttttggaacatccgtggagcatttgtacgtcaggagattccttcagatataaatagtccaatactattttcatctcagaatatgtttcaattctttgaagatagtgtaggtttgcgtactgctaaaggggttacaccacttgttattaaagagatggacgaaactatagcagaacttttttcta

SEQ ID NO: 8634 - DNA, 200 bp, Lawsonia intracellularis
caaatacaatgttaattacatcgctaggagagccattaaactttgaaggtgttccattgcgttggaatataggtagaaatttatgtgagatgacaccacaatccattgcacgtcgtaatcaatttttgaatagttggatgaaattaacaactttttcaaagtcattagtccaacaagcagggcaatacaaagagattgtt

SEQ ID NO: 8635 - DNA, 200 bp, Lawsonia intracellularis
gaaaaatattctaagaagtataatctttctgctgaacttatctatgcgattatttgtgtggaaagtagttttaatcctgcacaaataagtaaccgttcagcacatggacttatgcagattgtgcctgaaatggcaggtgttgaagtcaaacgttggtttggttattctggtttaccaacagcagaagaattattacatcc

SEQ ID NO: 8636 - DNA, 200 bp, Lawsonia intracellularis
agaaactaatataaagtatgggacatcatatttgtatttacttatgacaagacatttaaggcctattacaaattgtttatctagagaatattgtgctattgctgcttataatataggtgtaggggctatgttgaaaacatttgctgttacacctgaagaagcttttgctattattaatacatatacagcagctgaggtac

SEQ ID NO: 8637 - DNA, 200 bp, Lawsonia intracellularis
aagaacatcttatgcaaaagcttcctgcaaaacagacaagagtttttttagagagagttcttacttttaaggaaagctttactgttcttctttaaacaaagtaaatatattagagtttggtgttgttaaaagaaaatatagggatactataatgccaaaattgttcatactactcttttatacactaattttttttagtg

SEQ ID NO: 8638 - DNA, 200 bp, Lawsonia intracellularis
gatgttgtgtaactagtaaagttggtgttatagatcctataaggttattccaagaaagtgaacctgggaaaataggaatgaaccatttgaagacaatagaagatgctatgcaatcacagattgatcttgcacaaggaatcttggagaaattccctaaaaatgaaaatgttcgtgtccgattccaaaatatttttatggaa

SEQ ID NO: 8639 - DNA, 200 bp, Lawsonia intracellularis
tatcagcaaaaacttaacacagaacaacaaaaagttgttgaagttatgaactcattgattcaaaaaactcttgatgagtatagagtaaaaaatggatataatgtgattataactaaagacagtttattatcatatgattcttcttcggatataaccaatgatattattaccatacttaattccacaccattaacatttga

SEQ ID NO: 8640 - DNA, 200 bp, Lawsonia intracellularis
gcctgttgtacttgatagatttgatcctgaaactatagttccaccattatctaataataactaattataatttctaaggtaattctaaagatagaaatagttagaagattatataggtttattttttaagttctatactacagttaaacgtaatggctttcgagtgggaatccaagtaaagtgtacagaagggtagccaa

SEQ ID NO: 8641 - DNA, 200 bp, Lawsonia intracellularis
ccataaggcctgcataaatttttctatcttcaggaagagatagtcctaaatctatatcttgatttgctgctgcaacaacaaatcctgcccaacatgatcctaaattatgactatgtagtgcaagctcaaggtatgttatagctgctgtacaatcctgagctccccattttgaatctttttgtgcatgtgcaaggataact

SEQ ID NO: 8642 - DNA, 200 bp, Lawsonia intracellularis
gttggtgcatggcgtaaaataggatcatatccagcatcaaatgcagcagcaattttactatattttccaggtatagtacgtgcccagtcagctactctagaacttagttcatgtagtttttctttaccttcaactaaaatccattctacctgttgactatttatagctgttggagcatagcgagcttcatctagtgattc

SEQ ID NO: 8643 - DNA, 200 bp, Lawsonia intracellularis
atttaatatatcaaatgaaattgattgttctttataaaaacggattgatcgacggcttttaaaaagcattgtcctttgctgatcagataatgaaggttttgtggctttttgaagtagatctggacatattaagtcaagagttaatgctgaccgaggacagattgcaacacagtgtccacaatggagacagtgagataatc

SEQ ID NO: 8644 - DNA, 200 bp, Lawsonia intracellularis
tgttgttttttataatgatgtttttagaacgtcttacaaggatacttacagggcagacttttacacattgaccacattggatacaaagagtttgattaagagagagactcataaagtaattccattaattgtatggtagctacgttgaacgtttacttcttctaatagaaattttccggtaattgattgtggatcttgca

SEQ ID NO: 8645 - DNA, 200 bp, Lawsonia intracellularis
taatttcctcaggcgtcccggaagcaacaatatgtccaccattttctcctcctccagggcctaaatcaataacataatctgatgcaaggataacatctttattatgctcaataactacgactgttgcttttttatctacaagttgctgaagaacagtaattaatttgcctacttcatgcatatgtaaacctgttgtaggt

SEQ ID NO: 8646 - DNA, 200 bp, Lawsonia intracellularis
tcatctagtatatataatgtccctggtaaggaacgcttaccaagttctcgagaaattttgattcgttgtgcttcacctcctgaaagagttgttgctggttgtcctagctgaagatagtctaaacctacttcttcaagaatagcaagtttacgttctaatataggataattagtaaagaatttacgtgcttcatggactgc

SEQ ID NO: 8647 - DNA, 200 bp, Lawsonia intracellularis
aagtccgaggacttcagaaatattaagtccacgatatcgaacttctaatgtttcatgattatatcttttcccattacaaatgtcacatgtgacataaatatcaggtagaaaatgcatttctacacgaagttgaccgtctcctttacatgtttcacaacgacctccaggaacattaaaactaaatctacctggttgatacc

SEQ ID NO: 8648 - DNA, 200 bp, Lawsonia intracellularis
ctcttttttttgcatcaggtgtcatagcaaaaatattacgtatctcatcaaaaattttagtataggtagctgggttggagcgaggtgttttacctattggagtttggtcaatggaaatagttctttccaccttttcaataccttgaataccatggattattccaggttgatctacacggataccatgggcaagggcaagg

SEQ ID NO: 8649 - DNA, 200 bp, Lawsonia intracellularis
tgtttatagagtgtatcaacaactaaagagcttttaccagaacctgagacacctgttacacaggttagtgttcctaatggaaaggaacatgttatattttttaagttatgagtggtaataccctgtagtgtaagataattttttggctgtctacgtttatcaggtataggtatagttaaatctcctcgcatatatttggc

SEQ ID NO: 8650 - DNA, 200 bp, Lawsonia intracellularis
cgttaatgtattagattcattgataagttgacgaaatgaaccttggaagactttttctccaccatgaagtcctgagccagggccaagttctataatcatgtcagattcacgaatagttgcttcatcgtgttcaacaaccaaaacagtatttcctcttttttgaaggcttcgtaatgtagagactagtctctcattgtctc

SEQ ID NO: 8651 - DNA, 200 bp, Lawsonia intracellularis
gaggatgtaatccaatagatggttcatcaaggacatatgtaactccaacaagtcctgatccaagttgtgatgcaagtcgtattcgttgtgcttcacctcctgatagtgttgtcattgttctccctaatgagaggtagtcaagacctacgtttatcataaatttgagcctatgaataagctctttaaggagtggttcagca

SEQ ID NO: 8652 - DNA, 200 bp, Lawsonia intracellularis
ataattgcatgtctacctgaaaagataacctgttgtagccagttaagtgtttttgacacaggtatagtacaaagctcttgaattgatactccttgaatttgtacagcaagagcttctgtacgtaaacgtgcaccatgacaaacagggcagtccatgttttgtaggtagcgagagagaatatccctccacatatcgccata

SEQ ID NO: 8653 - DNA, 200 bp, Lawsonia intracellularis
ttgtaaactttgttcaaggatgggaataattccagaccagcgttgattgtctattgtcttttgtactgtttttttacttttggatagttgagagggagtatcatttatttgttctccataaaataaaatatcaagagcttcagcgttgaattctgagagtggtgttgaaagattaaatccatattttcttccaagctctt

SEQ ID NO: 8654 - DNA, 200 bp, Lawsonia intracellularis
taagagatgattcatagcgatgaaaaattttcggattagcccaaggtaaaatggcttttgtattaagagaaaggcctctattaggcgcaataagtaatggctcaaagtactctatggtccctaaaccagaacagcgaggacatgcaccttgagggctgttaaaagaaaaaaattgaggagtgagtgtaggaaagctaatt

SEQ ID NO: 8655 - DNA, 200 bp, Lawsonia intracellularis
cgacatgatgtgcatacagattctgtagcatggatagtatctattccttttttttcatcagatatacttatttcatgaataataacatgtcctccaccataacgtagggctagttctactgagtcagcgagtcgtcctcttatatcatttttaataataagtcgatcaactaccaattcaatagtatgttttttattttt

SEQ ID NO: 8656 - DNA, 200 bp, Lawsonia intracellularis
atcaagagagggagcttcatcaatagtatataatataccatcaatacgtacacgaacaaaaccatcagctttaagtttttttaacttttctatgtgtgttcctttttgaagttcaacaagaggcgaaagaagaatgatttttgttccttcaggtaatgctaaaatatccgcaataatttcatctactgaacgagcttcaa

SEQ ID NO: 8657 - DNA, 200 bp, Lawsonia intracellularis
taggtttgctacaacctgtacaatacattttacctagacgagcataaaatactcgaagaaagtcataaatttcagtagttgttcctactgttgatcgaggatttcgtcctgttgtttgttgttcaagtgaaatagctggtgaaagaccttctattttatcaatgtcaggtttatccatttgaggtaaaaattgtcgagca

SEQ ID NO: 8658 - DNA, 200 bp, Lawsonia intracellularis
taagtagaaagagattctatgtaacgacgctgtccttcagcatacacaatatcaaacgctaaggtagattttcctgagcctgaaggtccacaaataacaacaagtttttctcttgggatatcaatagtgatatttttaaggttatgttgtctagcaccttcaatatgaatacatttgttcattatggtttatatattcct

SEQ ID NO: 8659 - DNA, 200 bp, Lawsonia intracellularis
tatagtatatacagcaaaaatgaaaagttattagttggattaagtataatagtagagttgctgagctgtaatgataacacatatggtttcatagataaatattatggctattactaaattttagttataataggacaaaaaacagattagaatatcttatagttaattatataaaaggtaggcttaaaaactataccata

SEQ ID NO: 8660 - DNA, 200 bp, Lawsonia intracellularis
gaaattagaagaaatcgtctaatctttacagtaactttataagcaaaaagaagaagactaaagggttcagaaaaaataagagaaaagtagtaataattatagattattaagtatacttattaacttaaaatagagaggtaaataaggcagcagctaatagctattgcaataaacatagagtaagtttttgggggatgatt

SEQ ID NO: 8661 - DNA, 200 bp, Lawsonia intracellularis
taattcccatggttctggagaggccaaatgttttgctataataacagtcgactgtttagatatggacataataagaatacgtgtagttgtgctcattataacttgtatatgttgtagcctagaaagaagagaaagcctatgcctagtagttgcttgaatttgtgagactgtatgaaataatcgtggaatagtatgaagca

SEQ ID NO: 8662 - DNA, 200 bp, Lawsonia intracellularis
ttaatgaaagagcaagtgttatttcccatgtatgttgcttaaaaaaaggacggagataccatcctgcagctagtgctatatgtcgtggtgttgtttttgaaataagacataatcctagtaagataaggacacaaagtcgtaatcccaatataactgtattagtcagtagttcataacaacttattggcatagttagacta

SEQ ID NO: 8663 - DNA, 200 bp, Lawsonia intracellularis
tctataataaattttatcatgcaccaactacaaacaaaaaagatagcatggtaatataatgtagattttttatatatggattgattgaagaatggattataaagacagttaagtagacaaaaagaaattatacaaagataaagaggggaaagccaccaaactgtaattccacaaactatagttaaaagaagaagtggtcg

SEQ ID NO: 8664 - DNA, 200 bp, Lawsonia intracellularis
gggatcattatataatttgagaagatgcattttgtatccaaaaagatggtagacgaatattccactcaggatgttcagaaatcatatgtaatgtttcttttggtgagccaaaaaagacttgttttccttcagataatatcaatatgttagttgtaatatctataatttgttcaagatcatggacgcttatgattctagta

SEQ ID NO: 8665 - DNA, 200 bp, Lawsonia intracellularis
agacctttttgaccaagttgttgtagtattttacttaactggagggtagcaggataatcaagtccagaatatggttcatctaaaagaagaagatctggtttaagcataagtgcagaagcaatattaagcttttgtttttgtccatgagaaagatgatgtacacttgaattccaatatttttcaagtgcaaacaatgaagc

SEQ ID NO: 8666 - DNA, 200 bp, Lawsonia intracellularis
taactcataagctttctgcttatattcatccttaggattagaccaaggaagaagtagattttctttcactgttgagccaagaagttgtatttcaacgtcttgtaacagtaatgctgttttttttaatagtgaagattcacttccaggacaacagatttcatccattatataagttccttcacaaatatgttggacacctg

SEQ ID NO: 8667 - DNA, 200 bp, Lawsonia intracellularis
ctaagagttgaaggagagtggatttacctgagccattactgccacaaatacataaaaggctacctgatgaaagggagaatgtaatatcttgtactgctggagtgtgttcttgtggccattgaaaggacacagagttaagctggatcattaggaagtaatccttttttaagcaaatatttccaaatagcaaaagcaataac

SEQ ID NO: 8668 - DNA, 200 bp, Lawsonia intracellularis
aagctttaatatatctccaggtaaaaatggtaatacaccagtaagaattgcttttgttggggaaaaacttagtacccacattaagcctgtggcaccacaaaaataggttaccgctagtccaaggctcataaaaaggatagttatagcttttttaggtggacaatttttgttatggccactaccaaagccagttaaatagg

SEQ ID NO: 8669 - DNA, 200 bp, Lawsonia intracellularis
caagacctataaatcctatgagatatcctcctgtaggacttaaaaggactcctggtccagctttacctccagcaaacacaggaagaccaatgcagcctgcaaaaatataaagaataacacatagtgctgcccgttttccaccaatacatagtcctgtgagtgaaatagatagtgattggagagtaaaaggtattggacct

SEQ ID NO: 8670 - DNA, 200 bp, Lawsonia intracellularis
agaggaaaactaataaaggcacttacagcaatgagtgcagcaaaaaaagcaatccatacaatagtattaatacgggtaaatgtagaactcatagtattatctattcatcctagtgtattttatgagtcactattggtcttctagtatattttttaaaagttcaaaggtttcagagagaccagatggatttgttcctcctg

SEQ ID NO: 8671 - DNA, 200 bp, Lawsonia intracellularis
cttgtgcttgatcaggccgtcctcctcctgcgccatggataggtactacaattttttttataagttctgaggcagtgaagttatggtgaagatcttttgagacatagagcaataagtgtacttttgttccctctgttgatgcaagacagactattccagaagaaagttttgaacgaatatcatccattatatctcgtaaa

SEQ ID NO: 8672 - DNA, 200 bp, Lawsonia intracellularis
gctttaagactgaaattttttaaatttgcagttagtacatctatgttatttattctagtgaggttatctaaaagatgttttccttgattagatagagagctagactctaatgtgtctacagttttttgtaagtttttattttcagagagaattgatgtaactttttcaacaactttttctggttttgttttaagaatagc

SEQ ID NO: 8673 - DNA, 200 bp, Lawsonia intracellularis
cgcagttgtggaaagctctttttggtattctttaatataagcaagggtatttctacctgtaattgcttcaatacgacgaactcctgcagctatacctgtctcagatacaataataaaacagcctgcttgtcctgtggatgttagatgagtaccaccacaaagttcaatggaggctgtctggttttctgaaccaatagtaa

SEQ ID NO: 8674 - DNA, 200 bp, Lawsonia intracellularis
caacacgtacaatgtttccatatttttcttcaaatagagccattgcacctttttcaagagctgattgttgatccataaactcaactctaagaggtaagttagccataataatagtgtttacttgtagttctatagcatgaatttcttcttcagtgaggggggctatatgtgtaaagtcaaaacgtaggcgtgttggacta

SEQ ID NO: 8675 - DNA, 200 bp, Lawsonia intracellularis
acaagagagccagcttgtctaacatggtcaccaagtattttttgtaaaactgattgcagtatatgagtgcatgtatggtttcttgcagtatctagacgttcagattctgaaactactaatagtgcttcttgatcaagtaagatagttccagatgtgacagtaacaacatgtacaataagatttgttgctggttttaatgt

SEQ ID NO: 8676 - DNA, 200 bp, Lawsonia intracellularis
atcaacaacttgtgttttacctgttattgtactgagtatacctatatcaccagtttgtcctcctgatgtcccataaaaaggggtcatatctgttataacatagccagaactttttgtagggagttcttcaataggaagaccatctatatcaagtaacgcaacaattcttcctgttcctgaaagattttcatatccaatga

SEQ ID NO: 8677 - DNA, 200 bp, Lawsonia intracellularis
attctgattgcataccatcttcaagaagtgtttgaaagcaagcttcaatacgtttttctccagatcctttccattggcttctagctcgttctttttgttcttgcattaagtgttgaaagttagcttcatcgacagcaaaatgtttttttgatgcaatatcgttaataatatcaagtgggaaaccataggtatcataaagt

SEQ ID NO: 8678 - DNA, 200 bp, Lawsonia intracellularis
ttaaatgcaatatctccaggaagttctttagtatttttttctttaagagcattaagttcagcttcaagtaatataagacctttatctaatgtaatagaaaaacgttcttcctcatcaaaaactacacgtgacataaactcagatcgactatacagttcagtatagatatctcccatgagctcaacaactttatttactgt

SEQ ID NO: 8679 - DNA, 200 bp, Lawsonia intracellularis
tttatataggaaaggttgattcatgcctatttgttttccaaaacgaaaagctcgtcggatgagtcttcttaatacataacctcttccttcatttgaaggtaaaattccatcagcaatcataaaagctatagctctactgtgatcagcaataacacgtaaagctatatctgtttcttcatgttttttatagtgaacgccag

SEQ ID NO: 8680 - DNA, 200 bp, Lawsonia intracellularis
caatagatgccatatattgaataataggttggaaaaggtctgtatcataattagaagatttttgttggcaaatggctacaattctttcaagccccattcctgtatcaatcgaaggtttgggtagtattactctctctccggatgggagttgttcatattgcatgaaaacaagattccaaatttcaagaaatcgatcacag

SEQ ID NO: 8681 - DNA, 200 bp, Lawsonia intracellularis
tcacaagaaccaattccacagttatcaccacaacaaaatgtttcaccttggtcaaagtgaatttcagaacaaggtccacaaggtcctgtatcacccatagaccaaaaattatccttttctcccattctataaatacgactaggctctacaccaatcgtgtttacccagatgtcatatgcatcatcgtcatctttatagat

SEQ ID NO: 8682 - DNA, 200 bp, Lawsonia intracellularis
agtaatataaagaaattcttttgaaagattgagttcttctgttataaatgcccaggcaaattgaatagcttcttttttaaaatagtctccaaaagaaaagttaccaagcatttcaaaaaaagtatgatggcgagctgtacgtccaacattttctagatcattatgttttcccccaactcttaaacatttttgagctgttg

SEQ ID NO: 8683 - DNA, 200 bp, Lawsonia intracellularis
tcgcacgtaggtaatttcttgtttcttgaccagtaaagacttttttgaattgtaccatccctgcatttgtaaaaagaagcgatgggtcatcacgtggaataagagaagaagatggaatttcctgatgattatagtttttaaaatatcctaaaaatttttggcgaatatcattaactgtgagcatatcttgttcctaatta

SEQ ID NO: 8684 - DNA, 200 bp, Lawsonia intracellularis
aaagtgattaaggaattagatatcatagttatcttcaagttcatcgcttacaggacaaaggagtttttcagggttcattcctaagtgttccatgagcgctgtttcaatagaactttttagactagtattttcatcaagtagagctctgactttttctttaccttgaccaagcttttcagaaccaaatgcaaaccatgatc

SEQ ID NO: 8685 - DNA, 200 bp, Lawsonia intracellularis
cgcttttatcaatgataccagcttcgacaccaagatcaatgagttctccggagcgagaaatacctgttccccaaatgatatcaaattttgcttcacggaatggaggagccattttatttttgacaacttttactcgtgtaagtgaaccataagattcttctttatctttaagggtttgtatctttcgtatatccattctc

SEQ ID NO: 8686 - DNA, 200 bp, Lawsonia intracellularis
acagagctatagaactttagtgcattacctcctgttgttgtttctggacttccataaccaactacaccaattttcatacgaatttgattaataaaaataactgcagtatgtgatttatggatagtaccagtaagcttacgtagtgcatgagacataagtcgtgcatgtccaccaacctgagtttctcccatagaaccttc

SEQ ID NO: 8687 - DNA, 200 bp, Lawsonia intracellularis
aagttctgtttgaggtataagagcagcaacagagtcaacaacaacaagatctacagcacctgatcgtactaacatatcagcaatttcaagtgcttgttccccatgatctggttgggaaataataagttcgtctgtttttacgccaaggcgtttagcgtaggctatatctaatgcatgttctgcatcaatgaaagcagctg

SEQ ID NO: 8688 - DNA, 200 bp, Lawsonia intracellularis
taccacctaatttttgacattcagctataatatgtagtgttaatgttgtcttaccggaagactctggtccataaatttctgtgacacgaccacgagggatacctccaataccaagagctaagtctagcccaatagagccagtaggaattacagctacttttacatgtacatcatctgagagcttcattacagcaccctgg

SEQ ID NO: 8689 - DNA, 200 bp, Lawsonia intracellularis
ccaaattttcgttcgatagtatctagtgctgttttaagggcttctcggcgggaatcttcaggagaaatagatttttttgccatggtaactccaaggtcttattataaatagtaagtaatatatgaatataatataagctgtactagatgtatagtttatattttagctaaagtttttgggaagttatgaaacaatacttc

SEQ ID NO: 8690 - DNA, 200 bp, Lawsonia intracellularis
cagtaggtacaggggactctacggttactaaagaaagtccactaggtgtttttgcaaagagaatcataccttgagattcaattcctctaatttttttaggagcaaggtttgtgacaacacatacttgtttgccaagcattgactctggagtatattgttgagcaatacctgaaagaatttgtcgaggcttgttttctcct

SEQ ID NO: 8691 - DNA, 200 bp, Lawsonia intracellularis
atatcgatagaaaaacatagaagattatctgcatttggatgttttgatgcctctactatagtgcctatacgtatttcaactttttgcaagtcattaaaagatatttcttcttgttcatatattgatggttgtgacccgttggattggaaagacattttattttccttatcacttatttcttcttttagctctattctagg

SEQ ID NO: 8692 - DNA, 200 bp, Lawsonia intracellularis
gaataaatttgatgttggtgcaagcatagttcctgttgttaactgctcccaagcatgaatatcattatttatacatgtggtaggtatattcccatatttttttgatttagatgttgagattcctaactgttttaacatagtaatggttatttctggcatgattggccataagctaatggctacttttctcatacactcta

SEQ ID NO: 8693 - DNA, 200 bp, Lawsonia intracellularis
atgtaagtcgaatgaccgttttcagacgatcagtttgtccttctttaaataatttccatggtgcttgagtgtctatatatttgtttagtgcacgaataagttcccataaagcttcaactgcttgagaaagacgcatatttttcatgagttgtatatagttatattgtgcattctcagtaagttgacgtaattgcatatca

SEQ ID NO: 8694 - DNA, 200 bp, Lawsonia intracellularis
ggttctgtgtactctttagcttcaggtaataagcttttaaaatatttagttgacattgaaagaacacggttaaataaattcccaagatcattcgcaagatcagaattaatacgatgtttaagcgattcttcagagaagttagcatcagagccaaaattcatctctcgtataaggaagtaacgaaaagcatcaaggccata

SEQ ID NO: 8695 - DNA, 200 bp, Lawsonia intracellularis
ttgctgaataagagtaataggatctatagcattatttaaagactttgacatcttagtatcacgattcaaccagtatccatgtacatttaaatgcttatacattggaagaccagcggacttaagcatagtgggccaaaagacagcatgaggttttaatatgtctttagcaataagatgttctccaggccaaaatgttttat

SEQ ID NO: 8696 - DNA, 200 bp, Lawsonia intracellularis
agtattcaccagttggccagtttaatgcagaaatatagcttataagggcatcaaaccaaacatagcatacatagtttgtatcaaagggcaattcaataccccatggaagtcgagtttttggacgtgatatacataaatcttctaatgctccactttctagtagagagagaacttcatttttatatctctctggtcgaata

SEQ ID NO: 8697 - DNA, 200 bp, Lawsonia intracellularis
agatttggatgttgttgaagatactctataagccatgagagatatttagacattttgaaaaagtagttctgttcttcaataaactctggttttgttttgtgttgaggacaaaaaccatcttctagttctttttctgtataaaaacgttcacatcctaaacaataataccctccaaactctccaaaatagatgtcaccagc

SEQ ID NO: 8698 - DNA, 200 bp, Lawsonia intracellularis
atcatagatatgttgaagaaatttttgaactgcttctttatgttgtaaatctgtagttctgataaatgcatcatatgtgatattgagttgaggccagagattttgaaattgtctacttatagagtctacaaactcttgtgttgaatatcctgcagcttctgctgcttgaataattttttctccatgttcatctgtacctg

SEQ ID NO: 8699 - DNA, 200 bp, Lawsonia intracellularis
taagaaagaaagttttttctcctaagatagaataaaaacgttgtaatacatcagcaacaattgttgaatatgcatgaccaagatgaggacgtgcatttacatagtaaataggtgttgagatataataagtagaagacacacatactcctttttcagtgttacataaatgtctattttttctcttgttaggtttagttatt

SEQ ID NO: 8700 - DNA, 200 bp, Lawsonia intracellularis
tttttctaatagcatagttatcttttagtgtatagaagataaaagttttttctatttatagacctagtattactaactttctgtaagaatagtatcaagagagttatcgtctattttattggtatcatgatctgataaaagtgttagaaaatcagaagagggatgtgaagttttattttggtgaggtatattttgtttaa

SEQ ID NO: 8701 - DNA, 200 bp, Lawsonia intracellularis
ttgtttgaggagtagtatgtgtgggatgaagtttatcccattcttcaagtgtgtattcaatttcttcattagacatgttaagtacagtaatagtatttttgaacagatttgttcggatgacttttaaactaccttgatctgtttggtaacgtttaccaatttttggactttgtttgttaaatatttgataattttcttgt

SEQ ID NO: 8702 - DNA, 200 bp, Lawsonia intracellularis
tcatagctaaggcaacaaagaagtttaccacagcttcctgagatttttgagggatttagaaatacgttttgttcttttgccatttttatagagacaggtgaaaagtcttttaaaaatcgtcggcaacaacagactctgccgcaattgccaatagcaccagtaagttgtgtttcatgacgttcaccaatttggcgaagttc

SEQ ID NO: 8703 - DNA, 200 bp, Lawsonia intracellularis
tattttagcatgatattctcttataagatcttttataaggtcacggaaatcaatgcggttaggtgcagtaaaataaaagatgtatttgctctgatccaaggtaatttctacatcaacaagtttcattgggagttgatgttcatgaatgcatgatttacaaaatgcaaaagcattttttgaaaactctttatttttattaa

SEQ ID NO: 8704 - DNA, 200 bp, Lawsonia intracellularis
cttgttctaaatctttctgtgttgctttacgaatgatggatggaacagttaaaggatcaatggagttaggaagactttgtaatatatctacaacttgtgtaaggcttatcccctgctctagttctacaacaactttgtctcctttcataatgaaaggatcttcacaaaaaaagatatcttttttcccatgtggtctaaaa

SEQ ID NO: 8705 - DNA, 200 bp, Lawsonia intracellularis
cttgtattaagtatacgtttcatggcctaaaactcatttattatatatagtaattttaagataagttttgttcttttttcggttattatcacatctgtgtcaatcatagtgtgagattagggtagtgatttgtaattaaaaattctaactgtagatagtggttagattatattataactctgtttagagaagaaaggcat

SEQ ID NO: 8706 - DNA, 200 bp, Lawsonia intracellularis
aaaaatattttctatactgaaaagtgaagttttagagatcctatattatgtgtaatatatcagtttcatggggctttacttggatattaacctaaattagtaagctctacttttaagtttgactcactaagaataaaatttataataaactataaataaatatagttttatagtcattaggataagttaaactataggta

SEQ ID NO: 8707 - DNA, 200 bp, Lawsonia intracellularis
acagaataaataagtattataaaaaacacttgtcaaataaggatgaatcaggtatttagtccacaatctttgtatggcaaggtagctcagttggttagagcatgcggttcatacccgcagggtcgggggttcaattccctcccttgctaccaattcaaaatgactatattcattatcaactatatttattaaattagatg

SEQ ID NO: 8708 - DNA, 200 bp, Lawsonia intracellularis
aattagttaaggatgatagtctcttttatctattataacattaaattttgatagttataggtagttaagaggaggtgttgcaatactaagctgtagttctcctgagaggaggataaatgctttccagatatataagaaacataagccattgtttaacacctctaactagtttgatattaatactttttattaagttatct

SEQ ID NO: 8709 - DNA, 200 bp, Lawsonia intracellularis
actagataattaaggtttagaggtttaaatttttatttattaattataactcatatgtaaattttattagtttattatagttacatctatacttattctagtataaaatcactaccaactttatgggtagttaatatttttttgctacctttggtgataaagttttttagctttgaaaagcaatctttagcagcacatta

SEQ ID NO: 8710 - DNA, 200 bp, Lawsonia intracellularis
tatatacattgtagaataatcaaaaaggaacagttttttatcctatatttgaagtatagttgtttttttagtcagactttttttgtctcattttttttcgggctactcttcgttgccatacaataaagtgaatagtagccatagttccatgtcctaaaaggtagagggctaaaagggtagcactgactttatgtacttct

SEQ ID NO: 8711 - DNA, 200 bp, Lawsonia intracellularis
ttaaaaaagtgtgcataaagtccatctgtttgccatccaataaaccaaattattcctgctaattctgtaagaagtaaagctcctaatccaagtccttgaacaacagcagctaaaccaccacttgttgggggtataagtttaaaagataagcttacttttaaatcttttataagttgtttagtatcaccccatagataagg

SEQ ID NO: 8712 - DNA, 200 bp, Lawsonia intracellularis
ataaaagtgccttatacctctatggaaaagacatgcaggtatgaagagtaatgttaatagtgtaagaaggataccaatagaaatatggacccagaggagactactacatattatatatgtatctggattttttgtagaacataaaaagccatatccaagaataaggttaataactataagtaatgtaataacaatatgaa

SEQ ID NO: 8713 - DNA, 200 bp, Lawsonia intracellularis
gtattcttacaactggtggttggaaataactcatgaacttccaaagtaaagcagtctgattagaaaagaatttggctatagacatatatacgctaccccctttttcttatcactactacatttactatatagcttatgttatttatctataaataataagtaatataaaaatgttaatgtttcttatcataaaattttat

SEQ ID NO: 8714 - DNA, 200 bp, Lawsonia intracellularis
gataagaaaatatattctttaaattatattctatctatagaatatagttacatatttagattaattccaaatagtaagctcttttcataagctaagctttagtatacaacacaataaagatatagaagaagaggttactctttaggaatagtatgattgcatatcttgaaggatatattgcagagtttggagaaacaagc

SEQ ID NO: 8715 - DNA, 200 bp, Lawsonia intracellularis
tgtgttgttgctacctctagtggtattgggtatgaagtttttttaactacacctacacgttcaacattacctaataaaggagaacaagtacgtttttatatttgtcatattgtacgggaagatatacaagaactgtttggctttgaaacatgggatgagcgacaaacgtttattgttttaacatctatatctaaagtcgg

SEQ ID NO: 8716 - DNA, 200 bp, Lawsonia intracellularis
tgcacgtacagcacttaacatgctttcaacttttcgaccaaatgatctaagacaatgtgttatagaagaagatatttttgctcttactcgtgtatctggaattggaaagaagacagcacaacatatttttcttgaacttaaatataaacttcaaattgatggaaatagtactacatcttcttccccttctattggtcaaa

SEQ ID NO: 8717 - DNA, 200 bp, Lawsonia intracellularis
gtcttttttatgatatattaacaggtcttcaaggactaggatatactaaagaagaaagttctgtagttataaagtccgttttgcaacatgaaccagatttagatgttggtagtgctcttagaagatgtctgaaacagctggtaaaggggtaacaatgcctgaaataatgcagtcttcttaccctgatgagacactttata

SEQ ID NO: 8718 - DNA, 200 bp, Lawsonia intracellularis
gagaaaaagatgatagtattcgcccttctcgactcgatgattttattggtcaagaagagttacgtgaaaatcttaaagtgtttttaaatgctgctcgtgatcgtggtcaggctatggatcatacattattttatggaaatccagggcttggaaaaacaaccctagctcaaattattgcagcagaactaggggtaaacctt

SEQ ID NO: 8719 - DNA, 200 bp, Lawsonia intracellularis
atttgtacttctggtcctgtccttgagcgtagtggagatcttgcagcaatactaacaaatctttcaaagcatgatatactatttgttgatgaaattcatagaatgcccattacagtggaagaaattttatatcctgcacttgaagattataaactggatttagttattggacaaggaccagctgctcgtacagtaaaaat

SEQ ID NO: 8720 - DNA, 200 bp, Lawsonia intracellularis
tgaattggaaccttttacccttgtaggagctacaacacgtattggtcttatatcttctcctttgcgtgatcgttttggaattattagccgacttgaattttatacacctgaagagttatcacaaattattttgcgtacaagtcgtattcttaatgttcctattactaaaaaaggcgctatagaaattggtcgacgctcta

SEQ ID NO: 8721 - DNA, 200 bp, Lawsonia intracellularis
gaggtacgccgagaatagctaaccgtttattaagacgtgttagagattttgcagctgtttttggctcagcaactgtagatgaagagcttgtaaatcatgcattacagaaacttgatgtggatgaaaaaggtttagatcagatggatcgaaaacttcttactgtccttattgagctttttgctggaggtcctgtaggaata

SEQ ID NO: 8722 - DNA, 200 bp, Lawsonia intracellularis
aaaacattagcagttgcatgttctgaagaggttcgtacaattgaagatatttatgaaccttatcttattcagtgtggttttatgaagcgtaccccccgtggtcgtatggctacggtgaaggcttataagcatttaaatttaacggattaatcttattggagcatatatgcctggagttacccctagggttgaattattat

SEQ ID NO: 8723 - DNA, 200 bp, Lawsonia intracellularis
cctatacaccagaaccgttgtcagttatttatgcatcatttagacagtgttatcatgctggatttgttggagatatgtggaagaaacttcttgatggagaaataccaaaagagaaacaagctagttttatccattcattaattgaatcaggccatacaagtcctattgaacatgtaagttttacgtttgctattagtggt

SEQ ID NO: 8724 - DNA, 200 bp, Lawsonia intracellularis
gtttcaagagcacttacacatcaactgatccgtcatagactggcttcctactctcagcagagtcaacggtatgtggatggatcaaagtttgaatatattgttcctccttctatagctaaggatcctaaagcacttgaaaaatttacagaacttatggagagaataggagaggactatagagagctgaaggctttgcttga

SEQ ID NO: 8725 - DNA, 200 bp, Lawsonia intracellularis
atctggtaaaagaacagcttcttctattgaagatgctcggtttgttttaccacaagcagctgcaacaaatattgttatgacaatgaattgtcgtgcattattaaacttttttgagcatagatgttgttttcgagctcaatgggaaattagaaatgtagcatacatgatgctcaaacattgccgaatgattatacctgcta

SEQ ID NO: 8726 - DNA, 200 bp, Lawsonia intracellularis
tttttgatcctgcaggagcaaagtgtgaaagacttcaatattgccctgaaggagaaaaatatacatgtggactatatccagtgcgttaatataatttatataacaagatattataaataagctcttatataaaagtataagagcttatttttttttttaataacttttaaaagtataatagtagtagtagtagtagtagt

SEQ ID NO: 8727 - DNA, 19 bp, Lawsonia intracellularis
agtagtagatggctaatat

SEQ ID NO: 8728 - DNA, 24 bp, Artificial Sequence
  primer
ttctcacattttcaaatcttttcc

SEQ ID NO: 8729 - DNA, 20 bp, Artificial Sequence
  primer
ccccacctttgtggttactt

SEQ ID NO: 8730 - DNA, 23 bp, Artificial Sequence
  primer
ttgacgttatctttagcctacca

SEQ ID NO: 8731 - DNA, 27 bp, Artificial Sequence
  primer
ttgtatattcaaaaaggttcaatgtaa

SEQ ID NO: 8732 - DNA, 21 bp, Artificial Sequence
  primer
caacacaaaatatccccttgg

SEQ ID NO: 8733 - DNA, 23 bp, Artificial Sequence
  primer
tcatgcatcgcatcttttaattt

SEQ ID NO: 8734 - DNA, 27 bp, Artificial Sequence
  primer
ggttactattcttaggttaatgccaga

SEQ ID NO: 8735 - DNA, 23 bp, Artificial Sequence
  primer
tgtgcctgtctttcttgtagtga

SEQ ID NO: 8736 - DNA, 27048 bp, Lawsonia intracellularis
aaaatgaaacacgagcaacatttattgtttctgaacaacagttagaatctattaaagcccttgcttattgggaacgattgtctatcaaagaacttattgcacatatgattgaatgttatttggaaacaaaaagtgaagttcttgaaactgctcttttatcatataggaagaaagtaacagtttctaacagcatagaaaaagaataactggctttatttaggagtattatgtgcctcatcaggttatgtaaatatatggtacatagataagggaatatatttggctattagaaaacgtaatcttaaaagtaagaatgctatatcttatcaagtatattggaataatccatatacaggtctacgtgaagcaaaaacgtttccaacgttatttgaagctagtgcgtttgaatcattaattaagcataggttaaaatatgaaaagacattttttaagcctaaagaaaatactacgttagaacctgtaaccttatatgatgctgtgttatgttatcttcaaaagaaaaaatttactccccaatatacaaaaataatcagttgtagcttgcagtctatattaacatcctatggtgatgtaaaactttctgagcttaaaacagatttttttgttcatttgaaaaattatcttgaaacaaaaacgaaaaagaatggtgaatgtttttcacgatcatatatacatatccaactatctcgtctaagaacaattttgaattgggcatatgaacaaggtatgcttgttatgcttcctaaaatgaaattaggagatccttattatactcggactatccctcctacgtttgatgaaattacaaggcttatagcagtatcaccaccccatttagttaggataattatccttggtgcagcctttggtctaagagtaggaccaagtgaattgttttctttaacatgggataaaatagatttgaaaagtggtgtagtaaggataagcacaagtaaaaaaaatcctcgattcccttggcgtgaggtccctataaaagatgagttgaaaccttttttttctacttggtttgaagaagatactaaaaatggattgtcatatgttattacatataaaggtaaacccattcgttctatacatagttcttggtcaaaagcattaaaaaatgccggaataactcgtcggatacggccttatgatttacgtcatagttttgctagtgaacttatttcatctggtgtagatgtgggaactgttgcacaattattgaatcattcttctccaaatatgctgtttaaatattaccaatatgtggagactaaacagaagaaaagagctattgaactgcttccttcagtttcatgtgacattactatgtgacgctataaagagatgtctataactttgactataacatattgatttaatatgtgaaatttattgttatctattataagcaatagtctttacaagactattgcttataatagataacatagtcataggtattaactgttaaccaagtagtattaggtttatatttgtttcaatctgagaagactacatggtttaaggctttagctattagttatccaaagacttacgtttagtttctacatcccagtgggctaatatatggatatctttttgttctaattgacgtagagttgtattatccgggacacgcactgtcatctgtgctatagcctcaatcattgataattctcctggcgtgatgtttggagctataaaaatacctttatctggggctataagaaattttggtgttatattatattgagattcaaatcgtgctatagtaacacttattttttcattaggctgtatttctgcagtgattgccccaagatatacaacgtgatcaggataaaggggattcccacggcatatttttaatcccattggagtaagggctaacatatgtagtatagagtattaactggaatagtccagttgctatcgttaatctttataagatgaaatatatttggttgaattaatggttttacaggtaaatgaagacgttttgttatttcatttaataatgaaataatatgttgatgactatctccagtaagaattattccatgattctgtaataaaaatatatttgtttttgtagaagatacttgttctgataaataatgacttaaagataaccctggttttatataaggaaccattatccaagatagaccatggagtttttttgctagatgagtatgtccatctggaagaatagaatggataatagcatcaatcatatgtaaatgaacaactagtttttgtggtagaatagcatgtattggtgtttctatagatggaagtaaagaagtttcgccataaacaagatcagaaagagattctattcctgtttttactctttcaagtacggagggtagtgatagggaaagaaaaatgtttttttttcattgcttgagaaagccatagtccagaagctttaatccataattgttccctttctttaagagatatatttcctcctgctccttgtgtaagtaacggattagagccaagtaaagcacttagaagatttatttgagaaagagaagatatcggaagcatggtttactttattatgtatgtgatgttgtcgtgtttatttttatagataaaggaagaatccaagctataaatgtagggaatactataaaagtaaataacatgagatctgtaaagtatgagctcactaaaaagggagcaagcatggagatggatataaatttacaaatagggtctaaaaagagacaaaagaattctccaatatgtctccatgtacctattttatatcttgagttttttggtgtaaaaaaggatataaagagatatttatgcatggtaaaagtttttcttcttcctcaagagtaagcatcttttattcagaagatagccaaagtttccaaagacacataacattacataacttaatacagttagaccatctagattaaaatgttcaaaggtacatgatatagcctatcatatataggacctttattatgaggtgctatttctataatttctcctttatagataaggtagaatttgataattgttcctggtggttacaaataaaaaacatcttttctcctgctaagctacttaagtttcaccataggggtattaaaattttaataagtggttttaatatgtataacctaattgttgaaaacgtttcctaactcctgacatggagataataggttgaaatttcatggttccttttttctctataaataaaaatgagctaaccacctatcaatggtaggtagtaacaaatgggttttgttaccttttcattttttattttaatctatttaatttttaaaaataaatctcctgtaggatctattaggatacgttcatatcctagcaaagttaagttgttataaagtctttgagagttttttattactatagcattaggtgagacatcttttacccaatttataaagaagatctgttcttcttttgtaggattttctaaattaagaaaagcagcaatattaggatcgtataacttaatgtattcatctagtgcaactaagtatctatttgtaaggacatgatatcttttcttaaatgtcgttaaccaacatgaaagatcataaggggctataattgtttgacctgaagtgagatttttatcaatagttgaaagtactttttcataaatatgtgggtaccatagtctgtcaaaacccattctctcaaaatttgaggatcttaagtttgaaagcgacagcatactaatagtaaaaaaacataacaaaatacactgtataaagtttttatttccctgtttaaagatagatacaatatatgttgcactaagtaatgtcagaccatatagccctatacatgcaataccccatattgggattgtccataattctctccaacaaatataaggagttactcctatttttaatatctgcatacaataaggatttagtggtattaaaaaatacaataaggtaagtaataagaaataatattttttcttttgattttttatatataaccagcttgttaaaataaaaaataatagtataaatttttgtatagtaccaaatacaaattgaacagtatcttcagttactactggaataacataactgttttttataggagaaataatagttataaaaaaggttataatccaaaatccataataacacattataggagaaataaggtaacacatgttacgtatagaaataaaagaataagcacatattaaactaaaaccaataatctgtgggacaataaagattgctgaagaagtacatccaaatgcagcaacagaaagaagaaagacatttaaaatgtctttcttctttttatcgttaataaaatcccaaatagaactatagataagaggtacaattatacttacaaatatagcctttccctggaaaaatcttacaaaggtaaagtttccgaaagatgcatgactttcagctaataagaaactgagtagtaaaaaaggaaagaatattactcgtggtgttattccaaagtgaaggaagaaacgtgaccaagctaacggatatagtatggaagatattgttgcaaggatgtaatgagagactttagcaggttgtaagtttgttaaagtagacaatacagcagaaagaacattaaatgattcaaactgataaggccaaattttaaatggtatatcgtgaaataatggatctgtctgaaaaagctgttcatgtggtaagtttattaagtgaactgctatagcaacaaaaagtgcatcatcagcatctgttcttttaatacaaattgttaataatgcatataaaaaagatagtaaaaagatagcaaaaagatctttccagactatttttatttttaaagtagatacagggatatttttttcttgttgttttttgtaaaatagacttacaagtaaaaaaataacacataatatccatgtcaagagatagcttttactgaaaaagtatataaacatgataatacatgctatactaatcattatagatatgtatttattttcatcttgaataaaattattagtagtatctgtatgttgttttatttgtataaaaatattattaaatttataataacaaaaataaattagagtagaaaaaatagataaaggaaaacctagataacaaaattgtataaatgtagctctacaaaataaaaaaatatgatagtatattgtaaaaaaagaaaagaagataagacagtatgatggaaagtgaatacataaagaaaagatacggtttattttcataggtcacatttattagtattagtttatataaaaattcccttaagaagagggaagaaatatataaactaatactagctatataactatttaattttcttaaataaatttaacgaatataaaattatatgcaatctccatttaaaacaatttttatatcttaagtgtattatctaactaatttagaaatattaatattagtattaatttatagttattattaccaataaatattttataattttatttgactaaaaggaattaaaaatttttacgttaccaaagttacaactgtcttaatgaaaatatttcttcaatatatatctatagtatgatattcatcatttttaacattctactataactagatattagttcttctataaaaagaaaggaagttgccataataattttttatagtacaaaaattgtaaaattaactcttcttaattattgctacaaaataatcttcaaaacacttttgagtaaaaacaataggttctaacaaaatagaactaatgctttatttttctatttcagaattatttttgctataaatattcggtataactaaacacattaataagataaaaaaagaagtataccaagtaactgtatatcgtaagtggataaatataggattattacatgaaaaaattattgctgttgatagcggtgtgatagcaaaaaatatagcagattctttttgcaaaaatatgttttttctttttaacaaaagaaaagatagtatgagtaaagaaagtataaagatacaccaagctatttgccaataatataaagttgtgttttttgcatacatctccattctagtatatgtccaatcttgtattctataaaaccatgaaagaggtatgtcagaaaatccttgttctttagtgcctttgaaattgtaatataaataaagtggggataaactataatgaagtattcccatgggatacctataacatatagacatccaatcattttttagtattgtacgaataatatctttatatacctctttacctaatggatcaatataagttcttatttgataaaaataatttgcttgagtgtcatatttagttacttcttctattggaagggtatttttaatatattgtggtaaattagggtaaatattttgcaagtagggccagcttaaggagcaagttatcatatgataacgatgaaagttatagtttaaagtaaatgtatcatttgttgaaggaagaaaatattttgtaattaaattacctgtaataccaaaaaaaaagacataatataagaggaacgaatttaagtcgacggattgaaggtttaataaatagatatataatgatactagtcataataatacctaataacatactaaaaaaacgtttcccacgtgtattggaggcaaagataaaagatataataaataggataaaaatagatgtgttatatatatatataactattagtaggatactgtttttttgtacaaaattcccataaaaaatagagagctaataaagtacatgacattgaagggattcaggtacaatagaatgattaaaatgcatgataagtgggtttgttcctactaagatagtaataattccacgacttttttttgaaacatttggtaataatgcaccagaaataaaccatatacttatgaaagtaagagttgtttgaatactaaacaaaataggaggaaaatatgttttacctcctatttcttgagaaaaacaaattaataaaggtaaagtaaatggtcgaatattatgtatgactaatggattacttcgtaagatataatcttctgaatccccataggagggaataagaccccagttgttacttatccattttatagatattaccaattgtaatataaaaagaatagagaaaaaaatttgaatatatattttaaaggatttttttctaattatttttaccatagattattagctagaatatagttcaaagttaaaagtttagtataattatatcattgctggtaaactatagtcgttccaacttgttcaaaagtaaactctatttcacgcaactcagataatgctcgtcttacacgattatgattttcttcttgaacatagaaaagaagaaatccgccacctccagcaccaaggagcttccctccaatagcgcctgcatcaagagcttttttataccaattatctattttttcatttgttactcctgaagccagttgccgtttaagctcccaattttcatgaagaatttctcccatcatattgatattattgtttaatagtgctttacgtaattcaaaagcaaggttaaccatctgggaaagaatcttactaatttgtactttattcacggtattgtctttttgctcagcaagaatttccattgctgcacgagtggttcctgtgtaaaaaagtaaaagatttttttgtagtcgttcttttccttctctacataaacaaagtttttctacagtaacagattcatctggatgaaattgaataaaattaagaccaccaacagcacaagcatattggtcttgttttccaataggatctcctagtttattgatttcaacatcacaggcatatgctgctaatccttcacgactaatatatcgtccttctgtataagtattacaaagaagagcaagaccaacagtaaatgctgaagaagagcctagtccagttcctgatgggatatcagcacatgagttaaaatctactccctttacattaaaatctttaaaaacttgatgcaggatagggtgttggatttctttaatagttgagacatgttcattacgtgtatatttaagtaaatatccattttgatggaaatatgggtatatggaaagatatacatatttattaatacttgtgctaacaacagcaccaccatgtttgagatagtatgcagggagatcactacctcccccagcaaaactaattcgtaatggtgtacgtgtaataatcataataattccttttggaatgtatttagactattttaaaataatatcaatagcttctgataaagagtctgcttgtaggttatactgatatgaagggatagaagttgaaacagcaccaataaatgctgtgttacacttagcagctttacctgctatcatatcgactatgttgtctcctatcatccaagattgttccatattaatattaaattgtttcatagcactaaaaaataaacctggttgtggtttcctacagttacatactgtttttaattcttgacgttctcctacaaaacctttctcaggataatgaggacagtagaaaattgcatctaagtatgctccctcattacctaataatgtttccatatatgcatgtagagcttcaagagcttcttcactaaaaaaaccttttgcaatacctggttggttagtaatgatgatagccaacttaccactttgattaattttcctaatagattttgtaacaccagggagtaacataaattgtgttttatcaatactattgttcatattagtacaaacaacaccatctctatctaaaaaaatagcaggacgagcattatcttggtgtaattttgtaacttttccacatataacatcataagaaacttgctttaaacgttcttttgttcccatatctttaatatattctgcagtcttataggcagaaaataagttaccgctttcttgttgaacaatatatggaaatatatctttaccaaaatctgaatatgaatctgaagggatatgattaaaaatgagaggatcaaggatatatacccctgcattaacaatattttgatagaaaaaattttttggatgaggtttagggaaaaatcctataatagtattatttaaatctactttaataatatcactatcatgaggatgatcattaggatgaacgacaattgtgccatataaagaagggtgtgtttcatcaaattttattaatttatggagattaaagttcatgacgatatctccataaaaaactagaaatcgactttgtaaaaaaggttgtgctagtttaacacttccagatgttcctagtggaaatggctcttttatatgtgtaatgtcaacgtcaaaacgactaccatcaccaaaatattcttggatatgacatgaaagtctaccagaaagaataaaaaatttttttataccatattgtttagcaaaaaaaatctgacgttctaagagagggactccattaataggaatcattgatttaggaatagttggtacccctaaacgagtagcattaccaccagcaatgattacacagtccataagttttttttactaccattttatatctatacgaagtctttttattaatccattatatatagatatgaacatattaaaagaattaaatatataaagccattttagacaatacactcccaagctacgaattgtaattttttttccttgtcgatatgaaatattcctccaaccactaaacgatgtatctaaaaattgttttacttcgctaataaattgttttagagggatagttgtttctgctatacgatgaacatctgctatccctacatgtataaacgcggctaaagttaataatggttcatagataggaagtatcccagcttgttcaaaatctttttttaagtttataagatcattcctaaaggttatagttttttttatagaggcgtttgttacagcagaatgttcatgagtaacataatgataaagtatttgtgggagaataacatatcgtttaatttttggagccaaagataaaaagaaaatacaatcttcataggcagatataggattttcagggaatcgagaatcacctattattgatcgtttaaaaatttttccccaaggggcagggaatatataagctaatgtatttatattttgaggggttacttgaaaaattgtttgactgaatttcatcatttcttttgaaaagatatgccctgatactgaaatacggtcaaacccacaacaaataaagtcagcatcaaatttaatcaacgaactaagcatgatttgtaaaatattttgttctacataatcatctgcgtcacaaaacataatataattcccttttgatagggaaataccaaggtttcttgctcctccttgtccacgacctttttgaagaacaaattgtatttgttctggataacgatttacatattcttttattacattatgacattcatctttgacattatctccgacacaaatgatttcaaaatttttatatgtttgtgatagaaatgaatctaggcaacgagcaatatcctgagatttataaacaggaataataacactaatttccatagcttatttaaactttatttattacttagttaccgttttgccataaacgatattgtgttaataatcggaagcttatctagtttcatttttctataaacagtattaatagttttaaacccatttaaaaatactggagaatcatatgtaatttgatagtgttttgttaatgcttgtaatgtgagctggatatttctttttgaaagtttaaataaatgtttttcatattcccaagctctggctgctgttgtatgaagtatatctggaagatcgtatctgtgagcttcactaacaaaaataagtatccccccccccccctctggttatcttattgtaatttaaagcattaaataaatgtttaataaaatcaaatggttttgaaatatgatgtaatacagatgcaccatatattacatcaaatttttcatctataggaaaaagttcattagtaataagtctacagtcaaacccttgtttaaccatattatcaacacatgactgtctaacttcaacgcctataaactttgccttaggatattttttttgcaagcttttaaaaagtaaaccatcattaaaaccaatctctaaaaaagacatattacttgtcacagtaaaatttgagtctatatattcaataatttgattatacttagtcaacaatatattttttttataatttttagtatgaataatatattcatattttttagtatcatctgattggatatcgatatttttcatttttatagttattatatctattacactttttttatcataaaagataaatttcctagaaaagaaatatgatgtaatttcattttacgatatatattatcaagagacttaaaccctgttatacaaacaggaggattagaatcaataacatattcgtttgttaatgcttgtaatgcattttttattttatttttagatatcttaaataattgtttttcatacttccaggttcttacaagagttgtatgtaatatactgactaaatcatacctatgagcttcattaacaaatgtaataattttgtccccctcccccccattagaaggctttagaagatcattatataaatatgttataaaatcaaagggtcttgaaatatgatgtaatacagatgtaccatatattacatcaaatttttcatctatagaaaaaaactcatcagtaataagtcggcagtcaaacccttgtttaaccatattatcaacacatgattgtctaacttcaacgcctataaactttgctttaggatattttttttgtaaacttttaaaaagtaaaccatcattaaaaccgatttctaaaaaagtcttattttctgatgatgttattccactatctatatatgtactaacttgtctgactttatcagcaaatatatttgctttatattgtctattttttaaaagacattcatatgttgcatcttcctgagattgaatttcaatattcttcataggaggtattatgttttttcttttgttaaaaattatatttctttttgaaaaaggccatagaaatgatctccaaaatatttttttgtagtaaagtaacgtacaaaaaaataagcaacttgatgaagtattttcatcctagtactcatgacatttttttgagcattattatatgccacaggaaaccatttacaaatatctctataaagaggagaaatgagagggaatccagcatacaatgttgtaataggtttaacaccaagagtttctaaaaaagattctacttcttttttcttaaagttgcgaacatgtccaataagtttttcataacttctcatcttacctgtaggaaaagaaagtaaaaggtacttatttgtttttgcaactaaagaggttagcaaactttgccaatcatctacatgttctaacacttcaaaagcagaaataagatcaaacattccaaaattatcttttgttatatctccaacacgaaatgttagattttttttgttatgtaccttattagccacttctattccattctctgctaaatcaaaaccatggacataagcattaggaaaaaaatttgctagtgttactgtgtggatacctattccacatccatagtctgctatttcatatatatatatatgattacagtatttttgtaatatacttacaattctatccgtatgatacctgaacataaaactatgtgttagataatggatagcaccttctgtccactttgtttcataaaaatttttattataatctgtaatcgtcatattcatttttgttaactaacttatagaaaactaaaactatattaattagaagagaacagtcataactattatttttttttaattattacaactaaatattcaacataaataaatataaaaaagataaaggttgtaccaatatctttttaaataaatatatattatatattgaagtagcagctatgaataaagtatattgtaattagttagccttttcaaaaagaccaataaattgatctccaaaatatttttttgttgaacaacaggatgcaagaaaatacataacatggtgaagaagttctacttttctactcataatattataatacgctttttcatatgtatttgaaagccatccacatgcttctcgataaataggtgaaaaaaatgggaatccagcatataaaactaataggggtttaacaccaagagtttctaaaaaggattctacttcttttcttttgaaattacgtaaatgtcctcccattttttcatactttctcattctccctacaggaaaggaaaacaataaatacttccttgagttgttaacaaatttttcaaggagtagtttccagtcttcaatatgttctaatacttcaaatgcactaataagatcaaaagttccaaaatcttcattagttacatctttagtatgaaaactaagattacttcttttattatatttattagcaatcgctatcccttgctcagaaaaatcaaacccataaacttgagcattggggaaacactttgcgagtgttactgtatgtaaacctaaaccacacccacagtcagctattctatatatatatatattcaaagcattcttatagtgtgttaatatgtaatttataaggaatgattgataacggtgtataaaactttttttcatatattgtagagtttctggtttccatctttcagcatatatcatcttattatcaatcatttctttgacctttctatttcctgaatcaaggattacatatttaataaagtttaagtaattatttataaacaaatataacaaatatagatcaactaactttatgatatttgttcattttttattattttctatttttttggacaagagatctatataccctctttaagtcaataaggttattcgcataataaccaaaatatccccatttacttatagcaaaaaggtatgctctaacaataagacgttcaatcttacgagataaactttttgaatatggccaatacgaaaggattttttcaccatataatctgttaatatccgaagcacgatatttattaataacagaataaaaataatccatcttatattgtttacattcaatacaggcttttggttttttctttaattctatgagatcctttaaagaataatcaaatattgatcctaataatgcatgttcaacaaattgattaaccacacagcaaacaacaacatttgcattttcatcgagcataagaactcgttcatgttcacaccaataatttgaaggagaagaattaagaattttatttaactgtttttcatcatgaagaaaaagatcttttgaaatcctttcctttgtatttagatcaattttacctgaaagaaaatctttaaaaactctataatctacaacatatgctaagtaatcatgtaaaatcattccatgttcattagcaaaggcttctgcgtccttaagctgctcaaagttatatatatatatatgaaatacaagaagggcttctccgacaaaaccacatcttcttaactctgtcagtagccggacaatattctgttttgtcttctcaaaactaaatccatgtgctgctttatagcattcatcagaaaaccctggcatagaaaatataattctatcaagattttttaataatgtagtatcgttaaaggaagctcttacagatccatttgaactaagtgtataatgtaaacctaaagaattcattacatcaaaaatgtcactaagattaggatgcaaaaatggttcacctttattaaaaagatcaactattgtatttttatttataattccttcattaagcatatatgttaaagttttatgcagaaactctggtgtaagaggcgtttgatttgaaggttcatgaaaaagatttgctctacctgtaggacaataataacatattgcattacaacgtggggtaacttcaaaaattaaatttgaataaggcttcataactcataccagtttttataagttaattttgtaactatttataattcaataataaagtagattataactactatgagttatctttaatgtaaagattgtcttattataataagatatagatagataactctatctaaagtagagtaaaaatttttttctatctataagagaacttattgggataattgtattattaaagaagtaaaattaagaaattttttcaaaaaatccaataaagtcaccaccaattttttttgaacaacattttgtataaaaaaaatacattatatcgtatactctttttaaaaagaaagaaggcttttttgccatagtattatggattgttccacgttgtaactcaattgctatttttgtaataggataataaaatgggaatccccaataaaaagcattgagtagtttatatccagaagctaacatatattcttttatttcatattttttaaaatgtctaaaatgttctcttaaatcatttttatacattttccctattggtacaaatataatgatatattttatattagattgaacccaataatctataacagactcccatacttgtatatgctcaagaacataaaaagaaacaagtaggtcatatggtgttgttagataataactactattaatgtcacaatattcaaatgttacttgctcaggatcttcccccccccccctcccatacaaacgggaggcataattaataccttcttttgaaaaatcaacaccctttattttagcattaggaaaaatttttattaaattgtatgtctttgacccatcaccacaaccaacatcaacaatacttttgatttgggacacatcaaaattacataacaatttttttaaaaggtataaaatatacctagcagcaaggctatctcttttatcccatgaatgttgagaataaaatgaattatatattttttggttattattgggacaatcttcttttaacatttatctctctttctttttaaacttagtatcttttttataaagataattcctgactttatactacgtaatccttcttcagggtcatggattgcttgtttaagtttcatcaaaatatatgctggtcgtaaatgatatttacgcagattctgattacataaatcaaccaattcttgacctgtaaatatatcagtatctatcacacaattatgactaccatcttctgtaagccattgagaaaaatcctctgtcttcaaataaccattttcttttgcccaagtatatgcttctgtccctggataaacatatagtggataaaattgcatagaatcacagttaattttaagagcaaaacgataattttctttttgtacttctagggaatctcctggtgttccagccataatgcaaccatgtaccataattcctgctttttgggcatctttagcaaactggtaataatttttgatcttttcgtttttatgcatttgatcaagtgcagactgaactccactttcaaaaccaacagttactaaacgacaacctgcctttttcataagaaaaagtgtttcataatctacatctccacggacattacaataccatgtcatattaagtttttcttcaataagtaactgacaaattttccttactcttgcagtattaacagtaaaacaatcatcttcaattccaatctctttaagatcagggaaattttctttaatatatttaaattcagctacaatattttcaggagaacgaggtcgataacgtcgactgtgaaatacttgagggtataaacaaaagaagcatttaaatggacagcccctacctgtgataatcataaccatagggtattttgcagctgcaaaaaaataatttttgtaatttaaatattttttataaacagacgtaacaaaaggaagggaatcaagatcttcaatcttttctctttcagctgtttttatatattcttcattatgacgaaaaactagaccagggacattatgtaaagacaacttttgttctaaagcatgtgctatatcacgaattgtaaaatcatactctccaatagttactgcatcaatacttttcgaaagattaagtgtatcctctggcagtgctgaaggatgtgtcccaacaagaataacaaaacaatgagggaaacgtcttttgatttcatctcctactttaacatcactataaatagaagcagtactagtatccaatacagctatatctgggataaaatcttctagtaaagtaaaaatatcttgtaattctaaattatcagcaggagcatctataaatcttacatcatgcccattttgctctgctacaccgacagcatatgctaaccaaaatggataataaagtgttcccccttttgttatagctggactacgtgatgtacgagaaaaccgacctttaaacggaggatttaaaaaaaagattttcacaatagactcttttaattttaaggttagtaatcttctattttaaaagaaaaataagaccaataaaaacaaaaagaactccaactcctctagtaattgatagtgtttcatgtaaaaaaaataatccgccaccaataatcattaaatatactaaaggaacgtataaagaaaaactttcagtaataccatattttgttaataataaagcaaaaaatacacctgctatccaacttagaatcatccctaaaatccataagtaaccgctggttactatatagcaaatcccctgtgtaaagtctaaattttttcctccatatctcatcaaaagtgtaccagttgctgcaataatcccattaagtagtagatataattttatatttatattcatcatattagctaagatttgacctggatagaatccatccaatgatgaagaataattgcatgacaagactcacattctccatatgcatttgttggaacataaaaatttaaatctccgagttgtcgaacagtattactaaaatgtttaccagttaaacttacacaaaaaatttgtttttcttgcatagattgtgctagacggattgtattaacaacattaggtgattcaccagaacaactaattacaacaagcatatccccagaacaaacatctcgtgcaaaaggcactgaaaaaacatattcgaaccctaaatcatttccaatagctgttaaaagcgataagtctgtaaaaacttttgtatttatttgagcattcttagttaaatcagctgaaaaatgactagccatagacgcagaagcgccattgcctataaaaaagactgtcctgttagtattacgtaattcttctgttttttgtacccaatgtataaaaccatcttctaatgaaagggagttacctccagaaatactcacttctacagaagtcaaaagctttgatattctttgaacataattattccatgatatttgcatatacttcctaattaaatctattacacatgttcatcttttctttttaaagaatcctcaagttcttgaatacgcaattttaaaaaagtaacttcttgcataagaagctttttatgtctccaaccatgggaaacacttacagaaagctgaagacaaataagcataaataaaaaaagagtaaacattattaaagtaactgttggggagggaaaagaaatatgtatccataaccattccgcaatattataaagaaaaggaatacaaaaaatacttattgttatacagaaccataataatgcgtaacgttcacgtaacataccatttttaattaacgaaaataacgtaaagaaaaatataattcctaaaaggaaaacaatagttatatgtaatagtggcataataacttctttttattatataactatatatggctatagtataggaaagtatatttatatatttttgctatacttattatttattaatatactgctttgtcgtcttactagttcagtaatgataacatcatatctagaaaactttgcatgaattaataatagtaataaaaaatttattataacaaaaaagtataataataagtctgtaccacgtccaataccaacagctttagcaacaacagttgttacttcaggctctaccacaaaaaacattcctaacaaagacaatatcatcataaaataagataataatgatgtatagttttttcgtatagcaatggaacataagaaaacaaaaaacatacaaataaaaaggataaaagacataatcatttgttaagactccatataaaaagttcttttactatattaaaagaattttttaacttttgcccctttgaaatggcatattctgtatataaaatagttacaggaatttctttatatctaagacgatgtttctttatattattaataatttcagaggcatgagacattctgttttgctttattgaaatcacttttaatgctttttttgatagtgctcttagtccattatgtgcatctgtaacttttacccctgtagtcatcctaacaaatattgttgctaatcgtagccatatttttttcgacaatggcatattaaaagatttagtacctaaaaatctacttccacaaactatatcagcttggtcagcagcaataacttcaaccatttttaatgcatcttcaattcgatgttgtccatccgcatcaaaagtaataacaatatctgcaccctcttttaaagcaaagttaaatcctgtctgtaatgctgcaccttgacctaaattcattggatgtctaataactattgcaccactttcaaatgctaattttgctgtttcgtcttctgaatggtcatcaacaacaatgacatctcttatatatatatatcagagaggacagactaaataacagaagcttcattgtaagcagggataataaccatcgttttcatagcataacaatctaaaaacaatttttactctatttaagtttacttaaaactatctataacttgctataattatataaaattatagaattattattacacaatatatttagatagtaaatttttttgccaaagccaactatcatacaccatatcttcaagacctttttgtgccttccaattaagctctctgaatgcttttgttgggtctgcataacaacttgctacatctcctgaccgacgagcaacaacacaataggggacagaaatattattcactttttcaaaagtatgaataagttctaatacgcttatacctttacctgttccaagattatagatatgacaacctgttttattttcttctgccttttttaacgcagccatatggccagcaataagatcagtcacatgaatataatcacgaacacctgttccatctattgtctcataatcatcaccaaaaatatatatttctttctgtatgccagcagcaacctggcaaattataggcattacattcgttggtgcatttttagaatgctcacctaaaataaatccttttccaccacctcctactgggttaaagtaacgcaaaataaatgcattaaacatgggataagcatttgctacatcaaaaataatttgctcaatatgtagttttgtttttccataaggattgatagcagctagtggatgttcttctgttaatggtaaatattgaggaataccatatactgttgcagacgagctgaatataaatgtactattatatttaaggcatagccgtaagatagttaatgtagaattataattattttgataatactctaatgggatctttagagattcagctatagatttatacccagcaaaatgaataacagcatcaaaagtatactttgaaaaaagtacttccatcattgaagtatcttctacatttgcttttacaaactctattttttcttttacaatactttcaataaaatatactatatcttcactactattatggagattatcaacgcataccaccgtatatccgttataaataagctcaataaccatatggcttcctaagtagcctagtccaccagtaacaagaatttttttcataagaaaatcagattagtatataatagtactacaataatatatatatatattatgttgggaagataatagaaataatctttatgatatcttagtaccacctataaatgccataactactcctatacacattcggataatatagtatataggccggataacacctgaatgaatactttgatctgtagtattttgatacatagctacaccaacttctataatcttacaactatttcgataagataaaataagcatatctgcatctgggtattcatccgcaaatttttctgatgcccataaagaaagtgcatgatgcgaaagagctctataaccacttgtaggatcagtaattttttgtcctgttaatatttttattagaaaagaaaaaaaatttttaccaataagtctaaatggttgcatcgtatagtccccaacattgagaaatcgactaccaatcacaatatcggcattatttgtaacaagagtatgcaataaaagtatactatcatctgggttatgttgaccatcaccatcaagattgataatatatttatacccattcaacagtgcatacttataacctgtttgtaatgcaacagctactcccatattaaagggatgacttaatactatagcttttgcctcttctgctttttttgctgttgcatcaggcgaagcatcatttacaactaagacatcaaagcctaacttacgtaattttctaacaatacatccaatatgtttttcttctttatatgctgggataatgacaagcgtttctcttataatttcatatagatatatattatttgagagactttgtatatctatagcttccattttctatcctaatagtaagcagaactaagcataactgttttaatgataattaatagcatattactatcttaaaatactaatgatgatattcacataactagcctatttaataagatatcttctaaatttcttcgtccatcaaaaatagcagctacttcaacatgatcatcttttatcctataaaaaatacgccaaggatgaacattaagctctctaattgtacttatacctaactgtaataactctggtgtatatttccctcgttcaggcatcgaggacaatgatacaatttttttttctaactttatccttgctatttttgcttgttctaaggagtctgtatgcataatataaagaaaaatttcaaaaagatcatcttcagcttcggatgttaataaaacatcaaaagcattattcgacatagtctgctatccttttatcaagatctttaaatacttccttaactggtttaagattaccttcatcagcacttttaaatcgcaacaacaagactttaagcaatactatattattttttaattgttcataatctttaatccccataagaacagcagaggcctctccattttgtgtaataatcataggacctgaaatatttacctgctctaacaccttagcactattagcttttatataactaataggttttatatcttgacttaatttcataatacctcccaaaattattaaactaaatgtagaccatattcggtttaagtcaatagtttgatatacaccctagtacacaatcactagaaataacatagtaaattttagaataaataggattttgctattcgggttttggagtagatgtataattacatattttataatatttttaataacataagggaaaaccttacatagtggtgtgtaaaattttttcgggttttgaagtaggatgttattatagtaaaacaatctatttttataaaatgacattgtaatttaggtaaaaaaacaccattgggttttgaagtaggataattcgggttttgaagtaggataattcggattttgaagtagattttttcgggttttgaagtaggatgttacctataaccataagaacctctaaaggaaaataggtaataaaagaaataaaggtaataaagggataaaagaaatatttttttattaataaaatttttcgggttttgaagtagagtacacttttattcttctataatatatttttgtttttctggaaatgttgtctgctctcgctcaattaaaataatatcttgttcaacaaaacgactttttttagttaataactgatgtttaataagctcagctaatgcaagctttaacatttggcgtgttttccatagtggttgctctctatccatattcaatgcatctgcaagtgttaaaaaatgtcctgtaaaaacaagatcttttttatgactttgaacaaatctatataacgctttagcaatacttcctttaagtcctacacgttttaaaacatcaatcattgttattgtttttgcataatatgcttcataaaaaaatggattaactgttactgctaattcttttttatcatcatcccaaaaaacagctgaaagcatagatgtcatatatcgctttttgggttcacgtcgttttcctgcttttgttttacctcctgcaagagttagttcaacaccagctactgtaagtaactttaatcctcgaataagcctattgtaatcttttttactaggttttgtatatcctaatagttttaataaaggtaatgcaggccctttatatgtatatgttttctttccctccacttctgtaggctttctatgatgacttacaccatttaatattgccaataaggccattaatgtgtcttcttcgtatgtagaaagttttggtccagtatatgtaatttctccccagttggcagaagtgataataaaatctcgaaggaactcacgatttcctaattctttgggattcatagggaaaaaagggctacatcgtgttaaatctgtaggatacccacaccatgtcattaaactattttgctctggtgctgaactagtaacttcttttcggatggctgtagcttgtttttgagcttcttcacctaattccattcctctacgtatactagcaatccatgctttaccaatagggctaccactttttagctcttctagtaattgaggattaatacatgctaactctttttcttcttcaggtgttaattctatgttagcattcattacaaatatctccgaataggataattctattttgttgtttagaatggtaatagtatatcatgtaaacaatatatcttcaaatggggacgtatatatttagcatatagtatatatacaaaaaaatagattgttatttgacaacatctctagttattttttaagttaattactattaaaaaataaaaatagtatttataaaaaaataatgtttacttataattgtaaaattttttcatcccctacaaaattttttatattaaactttttcttttggggagtcatttttctttttcttataccaccattccaagcacctgatgaacaggtacacttccctagagtatttgagttatcatgtggtaaaattttattatctaaaggtgaaaaagttggtggctctaaccttccaacatctattcaagcgtttacttcaataaggggtgatatccctttccataaagagcataaatttgactataaaacattatatcatcatcttacaacacctattaatgaaagagaaacgacttttatcacctttagtacacaactctattcaccattccaatatcttcctcaagtattaggagtaagagtaggtaaaatattcaatatttctatctgtattttatactacttaggaagactttttagcttatgtattattggagtgctcctttatttatctataaaatatatgccatttaataagtgggcattagtgatgctttgtttatcacctatgtcactatttttagctgtatcccactcctctgatcctatgatatttgcatgttcatttttattgatagctattgttcttcgtagtatgtatgacacctcttttcgattgagtgtttccattactgggttacttttattatgtattgctacacttgcaacttcaaagtttggaagttattttcctattcttttaatagtattattaatgcctactatagtattttcagataaaagagttggctatatatttaaactaatgctgtttgctataggcattgcattagcattgttttggaatctaaaaacaaaatttatttttgatgagttatcagatagtaacgctatttttactaataatattcatatgttatgttcttatgaatatattcagcttgttttacgcacatttataatactggctcatcgattatacctatctttttttaccctaggctggcttgataccccactacctaatattatgtgttattgttggggggttttgcttatcttactcacagttttttctagctcatcgatatctgcatatattcctttacttactagaatacttttcttttttatttcattagtaatatcaataggcattgttacaagtatgtatttggggtgtggaactacaggagagaatgttattaatggaattcaaggaagatattttttccctatttctatgcttgttcttctcacattttcaaatcttttccttattactgagcataaggtttttcaaaaaataaaatatactatttttgatagatggtacgtagtacagttattcttaatagtatttttgatgacaacagtatatgtcgtttttcaaagatattatgttagctagtattctatagttttttttttttttttacttaataaacataataataataataataataataataataataataatgtttactaaaattactagttttactaaaaaatataggtaactgtagttgatatggtatattttgttttttattatttttgtgtaatcttaataagataagaacataacatatagaggaaataatggctaaaataatagcaataagtaaccacaaaggtggggtaggtaaaacgacatctactgttaacattggtgctggtattagtaatggtaaaaaaggaaaacgagttcttttaattgacttagacccacaggcaaatttaagtcaaagtcttggggtccagcatgctgaaatgactatttatggttctcttaaaggtagctatcctttaacaccaatagaaataacgcaaaagctttttttgattccatcgacacttgatctttctggtgctgagatagagttaagctcagaagcaggtcgagaatttcttttacaagatctcatagaaccattacatgatcagtatgattttatttttattgattgtcctccatcattggggcttcttacaatcaatgctcttacagcatctgatgaagtgtatatccctctccaaactcaatatttagcattacatggtcttacaaagcttttagaagtaatagaaaagatacaaaaaaggttaaataaaaatttaaaattaggaggtgttatccttacacaattcgatgcacgtaagacattagatagagatgttgcaaacactatacaagaacattttgaggataaagtgtttaaaacaaaaattaggaatactgttgttctagcagaagcaccaagtcaaggcttagatgtttttcgatatagtccaaaaagtatgggcgctgaagattatttactgctatgtaaagaaattttaacaaaatctaaaaagtaagttacaattgttaggtaaacaatgtttattaaataaatgtagtttagtaaaaaataattgattatttggttgtataaataaataaaataatattgacataataagtaatgttgatagtctatgtaaataaaataaacataataatattgaaaaactacataatgtaaataaatgtattaaacaaagtagatataataaatcgagtatactatgtctaaaaattttactagtggtttagctacaattttaggagaggctccttctaaatctaaaagaaaagagacttctgatataaaaaaagtaattacaaaaagttctcaaattggaacaaaagaaaat

SEQ ID NO: 8737 - DNA, 39794 bp, Lawsonia intracellularis
tgatattttgtttggagatgaataactgacctcattattcattatttgaacaattaattacttcttattaataaaaaataatattgatatatgatttatcctgttcataaaaatatacagaagaaactaactccaaatcataaaatcattatcaccagatggctaaaaataataaaaagtttatcaccttataataaataataaagtagttctatactgctaattatagaacactaggaaaaggtaaatttattaaaaaaagctagttagtttacaaaatatattaagtagatatctataaaaacaacttggaaagtaatagactagtatattgacttttgtattaccaagtattacctgttaacatctaaacctgtaactattacaactagaagggttaacagtgaaaactttgtctaatacaacttctgttaaacttgaagactcagtaaaaacacggattaaaaatcttgctgctattcgtaaacggacaccacactcaatcatggtggaggctattgaagaatatattgataaagctgaaaaacgtgaagcttttagacaagaaggtattaatgtttataatgactatcttaataatgggttacacttacctgtagaagaagctatagcttggcttaatgagcttgcaaatggtaattatgtggagccacctaagtgtcatctataaaaattgaattcatgccatatgcgattgaatgtattaacaaaatttataccttcttagaaaagagtgataaagaagcagctaaaaatatagcaaaaattattctcaacaaaatcagaatattagagaaattccctaatttaggtagatcttccatagacttagaaccagagcagcgagagcttattgttccttttggagcaacaggttatgttattctttatacattacaacataacattatttttattttatctgtaagacatcaaaaagaagttggctattaaacaaaaacttctatctttatttttctctatattcattaaataaaaaagcatcctagaagggcgcttttttcacccttttgcatacaaaacaaatatattttaccgcatcttatataaaatatcagtaaagggaaatatcctctaaaaaatagactacaaaaattttcaatatacatgaaaatatacttatcaacttcaaaaatattactaaagaaactaaaaactaatcatatataacataatgtttaatacaaatggtttcataacagcaatcaatataatatgatttattatgacatagtattctatttatatagtagaaatataaaaaaataccttataaattttattacaataattaatactagtttttctaaaaaattagaataattgtaatttttaaaattataatgcttttaacaaaaataagtagataataatataaaaagtataacatttttattaattaaaaacttatatgttctttaattaatcattatacaattttaatgtagttagaaaaatataagtgatatgtacaatgtactataatagatatattaaaaatacacttttatagatcaagtttattattctataaataggataacaatatataatagttaaaaaaactattagaggaattattcaagcaggataaacattattgttacaaaacaattatcatttacaccatatgttgaatatctaatttctactgtaaaacaaaaataaagaaattttaatcgaaatgactatagtctttcgtaatcattgtaaattttctaataattcccaactacaaccatagataacagagatattaactattgtacaatcaatagtttgcactgtagaccatataattgatcctctaagaaaatatgaaatttctataccacatagaaaaaagccacatcaggacagaagtaggcagttcttacacagctattgtaatagataatcttgaattttccttactggtataataagtgtatcacaaaaaaaatcaaaagactatatgctccatttatattaacttatttgcataaccagtaagttttcattataaaagttatatgctaactattttagcatagttatcaaaaaagacatatcctactgtctttatataatattataattttcagctataattaataaaaattacttaaactaattatagtaaaaatattgtttgataactttagttaactagttgtaataatattactaacgattttacaataaaaaagttaatctatttcattataaagagtaatccatgggaaatcttcattcccactctctacttcttgttcaactatagtatctaacaattcaccaggccttactttcatatgtagagaaaattttactaacatttcaactgatggatgttcttcacccctttcaatttctccaatataatttcctttaacaccaagcttttctcctaatctagcttgagtcaatttagctgttttcctatagttacgtatgactagtcctatagacttaaaaaattttttagccatctttttaaataacctataaaataaaatattgactagattattaaaatgacataccaggtatttataatttattaattgaatgagttaataaattataaatacctgataagggctaatatttatttactagcgctgtcaggtacctttaaagataaaacacacaaataaaagtatagggagttcctccaatacctccctatacttttttatatcttgaataatgtcgtcaataatataaagatatattaatttctcatggagaatctatatagtgaatcttgatattgaattaacaccagaagaagaagaagaacttgccacaattaatccaaaattattggaagaacttaaaacgggaagtcctattggtaaagcatggcttgctagtatacaaagaagccgtgaattaaatgagttagcgttagaacaagcaaaagagatacgtgaagaagtcgctaaagccgctccagaacaaaatagtttaatgacttggtgtggttatccaacagacataacaagatgtagtccatttttccctatggggccaaaagaaatatcgcacagaccatatcttgaaaactttattataacttctgcgaactggggagaaattacctatacaggaccaaaactctcaacatacgaagaagatgctcttatggctttattagccattcttaatagtgtcagcgaataccgtcagacaacagaagtagaaggatctaaaacatacacctataaaggacctatgcttccattattaaaactgttgggccatgaacgaccaggaaaagcaaactataaccatcttcttcttgcattacaaaggcttatgtcggcagtagtaaagctttctatatccgtggggaaaacaaaatcaggaaaaagaaaagagcctaaaaaaatagacatgactacaatgttagctcatgtccactgggatgaagaaaagaaagaattatcagcaactattaatcctttcttttatgaatcttattatgctggaacagtcacaatgattgatgttcttaagcgagcaggacttaaagggagtatagctaaggcattatatagatttgtacaaagccatcgtaaaaatcctgtatttacaggacattttttgacacttgcagatgcccttaatatggatagagaccaaccatcaaaaaaaactcgtcagctattaaaaacagctatcctagaacttataaaacattctattttaagtcctgaaagtcgtttcatagatcaagatattgttaaacttgaacgtgtacaagtaatggtttgtgataaattaaaagtataggtacttaaaaagccgattgtatttactactaaaataataaaaatttttttatttttatatatcctttattacctttatattcctttctatagtgttttttatctagatagagtagcttttatagatgagttggcacttaaaaaaccgagaatcggcacttaaaaaaccgagaatcggcacttaaaaaaccgaaaatcggcacttaaaaaaccgaatgagtacttaaaaaaccgaacataactttaactaattattactatatataatattttttatccttcattcggttttttaagtaccattaactataaaattaaataagctagtctagccttatattttgtatgataaataaaattaattgttagtacttaaaaaaccgaatagaagaaataattctaattcatttgtttttattgttttaatttagtattattctgtttactaagaatgtattttgtctctttttatagtaaaagagataggtatattaaaaaatttgtgtatcttctatttatggttattatcagaactaaattttgaaggtgagaaaactatagctctatttttactaagtctaaaatattaataagtttttatttgttattttttttattaaaattataataaaaggaattagtgggctataacagcatctatatcatactagtatagcaatgaatatatccactttgtaaatagcaatcggttataaatgttagtttatttgttaagttagcggatgtatatatattattagttataatagattaatttgttttattattgttattatttaataactagttacttatatataatataatgtatgtatttaaataaagaaatagtttattatctctatatattctattttataggagtaatgtatggattttgagtttagctttagagatatagataaagttgtaaaagacgttgaagatatgtatgaaaaagatgatacattatcattagatcttttagattatttccctggtgtagaagaagatgaagaagatagagattttgaagttcttacagaatatgatacagactagaatagttatattcgatatgattcatttataacacaataaatgatacagttagaaacactacaaacttattatatacttatagtaggttagttttaatctattcatagaactggtttgaattctttatatagcaaggataatagttaactacataatatagttattagtgtgttaaaatttgtatgtaaatcctgcttgcccaccaatgcctttatcatttcctttatctccaaatatatcacagtgaatattaaaatgttctcccaataatatatttgtacctattgttgctctaactacacttgtatcattgtcatgcttgaacttcatttgaaggctctgggaactaattgcaaagtttccagactgaccttttatcctttcaataccagcataaagattaataggtgtggtaactggtagcttatattcaacggtaataccaagagaacttgttattaactggcttttatctaatatagccttatcattttgaattcctaaatcaaaatggtgtttagatgtttgttcaaaaataagttgtccacgaggattcattttaataccgttgttgaaagtgtatttccatccaagttcaagtgcttctgttggagttgtttctgtccatttaaaatttctatagaaccctgtagaattagtatgtaatttactagacgcaagttgtaaggtcaatgtactatagagcccagttttgttatggataagacctacataaccactaaccatacctagctcagcatcattttttgtagagttgacgctagaccatttacttttacctttagaagcaccaaaagcaagaccataaagggctttcatatctaaccttggtagttgttgaagatagtcatatcctgctgttgccattatccatggcatttttgctttgctaccaatagaagtatcaagactttcatgtccaccttgaacatttatccatagtccataatgttcgttgtctaaaagtttacttgaacggttttgtagagtccatatatgttgttgtcttagccagttagtagtctcacgagcaatagagaaagagtaaaaatcttgagatgcttggatattattaacataccaaatagatgttgttggatcaaactcaagatcactccaaatgagaccacttctagtttgtttaacaaaaagatctggtgatgaaaaagattgagagacaaaagcaagtggcaccatgctacttccaataagttttggtgataagcttaaatttacttttaatggttgatggataactaagagtgattgaggacctccaagaaactgtataacaggttggttcccaggtattaattttctaggtactagtgtaccgccattagcaacaaatagattggttatagataaatcagctagttgaatatttgaggtaatcagagttccggacaagattaaatttcttgtatccaataaaaagggcatatttttagtgccccattgtgtcatagcacctttttgtatgttaactaaatatggaagttctggaccatttattgtttttacaattgatctcttcccaggagtaaagtttatggttgaagagttggcattacctacgataattctttcaattaatccaccagacatgtttagtattgctaattcagtaattggtcttgtgcctggtatgaagttttctgaacccatagttaataatccaatagttccaccattaacatttgctgtagctatcatagtacgaccattaccttgtgagcctaaggtaaggtttgcaataagtccgtcgtgtatggtcgcagaggaattaatagttgtggctgcagctattacattagttccgacattaaggttagtaatattgccactattaatgattacagaggcattctcagttactccaagtccattgaaggttccgacattaaggttagtaatattactatcagtaacagttgctgtagttgatattgtatgaccttcgacactaccaaggtttaagttagtaatgttactagtattaacagttacatttagtgtgttaagttgattattttgactgacaggcccacattgtatattttgtatagtactgcttgtgatatctagggtaacaggacctacaagcattccaccagcccttggtataagagtaatatcattaatctgagaattaattacatttatagatgtgtccccatatactgaagaaccaaagtctactggtgataacccccttatatttgaatctgctatagatattttgagattacctaagatattacctctaccagagtttataagctcaacagtagatttttttacagttagagtagcatttccttttatccctgcatctacttctcctgtaatgtttacatattgaatcctagagtcttcaacatcaatgtttatgtctccatttacagtaatacgattaggtccattgcttactccagaacctattaatagtggagtttggacgtttttcaaatgcatgttgatagagcctagtacatgtccattttgagtatagacaccaccataaattcctctagtaacagaaacattttctagcttcatatttactgagccagtaacggttacaagtcctctattgctgatacctgcaccaattattctttctacatcagtattataaacagttagagtaacattgcctttaactgtatttgggttgttaaaactagacctaccaccaccaataattctgaaaacagaattgcggaaggctcctactgttgtgaaggtaagattagtaggtcctgtttcaagggttcctattgtagagtcagaacctccaaaaaaagaatcaaatggtttgtttacattgattaaggtttcggttctgccctcaaaaaagacgtctgcagcataaattttttgtttttctgtaagtgtaaaaaagaaaacacataaggaaaataataaaatttttatgatttgatgcttattaattatattatacataatattctttttattttttagttaaggtaaagaagaatagatataactaattaagtataataatatataaaagttttttattcaatttaaattaatcttattactttttttttaagatctattaagtagatatctaatatatatttacttacattaagttaatatattaaaattagttaggtaaataaactattaatagtgtataatttttattttatatagaattatagtataaattttattgtattgatatttaactataataacgtaagtataataatgttagcttaaaagatatagtctaagataaaggattagatattattatatttaatacgttatgttaaataaatgaattttgctcataaactaaaaaatattttaagttaaacataaataattatattagagaataatctttaatcttcttactaagaaccgtactattaagatattaaattatttagtaataacaaagcgtatcccataacctgtattacaccacttttttacttcttcaaatttttctttaaaatttggatcaatagcagataagcgtacaaaattttcccctacttttataagaggatcaactcctctaaattttggttttatatttagctccccttggccaaaagggtattctttaaaaatattgtgtacatcttttagatgtttcattcctttattgataaatttattattactagattctaacaaatgtaatacatttttatcagtaccatattttatctctgatagtgtaataagctttatttttaaagcttctttcaagatttcagtgaaatattcataaaaagcaaaattccatggagctccataaagttcttgagtaaattctaaagatagcattcctataatttttgcaggttttttatttaaaaagaaccaaataccatcttgaaattttaaattatctataaccattttagcttgattgcaggatattttttctacaataacaccagtatgcaggagatattggatacgatcagcacaaaggttaggtaaaggttgttctagagcactgtaagaaggattgtcaggatcaagatctttaagaaatatcccataaggttctgttactttttgaacgtgcattgtttttaaaaattttaaatgtattgtatcttgataagatttttctaaattacttttataaagtaagtgatcagcaatatgtgaaaaaacagtatgtgatacatcatgaagtaaccctgcaacttgttcattcaagggagcatttgctttttgtaataaagctaatactcctatgctatgttcatacctattgaagtaaggcatatatccaaaatatgttattggtccagattgatcaacatactttaaccgttggagtgtattgtgttctataattttttttaaaatagggtgttcaaaagtacattccccccatactgtctgtatggtaacagttcccaaagcttgttgtaataatgtgccaagaataaaagtagtactaagtaaagtaatagtaataaactttaaaaaaattgtattatatccttttattaaggattgatgtctttttttagaaaaaaaactcaccagttaatactccatctttaattggttatttagtattattcaatgtaataaaaataacttgtaatattacaagctatttttattaaaagtgttgtttataaaaaagttttactttaaaaaagtaacgtagttataaaaattctttgttatacaacaaagatttcatatagaatttttttattgaagacaagatatgtgtttttatactatgttaactaaagatagataccttaattttatttaatagtaggctttattacatattatttactaaactagctctttaagttaaagagcaaaggggattatttttatcctatgagtaaagaggttattaacagtagcagtttttacattgaaacttggtaacatattttaaatattggcttatccttaagtagaataacctaacaagacttagctgttattatgctaaaaatatataaatttttatttaagaaataattttttgttatcgttactctacaagtagttgcattgtgttctatagtaaacaagcctaaatattttaagcaaaaaaagctgttatattaataagttattaatacaaaaaaatattttgacaaatgatattttaatattatttagtcatttgtaagaaaaaatattatttataattatactagtacattaaaatctatcttacttgtttttaatgtataaaatagcataaagaaggttattcataagaataatataagaaagcttagaaaggttttatctacaattcaatttattatttagtaaaaatggttttcaatataagtctacaatagactacagataattttaacatacattagggcatttttatatctctattacgtatttttttaagatgaaaatacgtaaatcttagaaggtattatatagtagcatacataatagtattgctatctacttaccatactactttatcaaaaattttttatctactataaaggatatatatgatagtaaataagctgtcaatctttatctataactatactactaaagtacgacattatattaattgtatctaccatacttgtgtatcttatagtcaaatttttcgaagttggctttggtatcgtcgacaattaagaataggattacttttctttttatatttagttagtgtttatggcttatcattttcgaaaagtcctgaagaaaatgaagaagaagctaaaggacgtcaacgggtacaagcaatggaacttagctttcataatgcagcaattagtcaagaagtaaatgagactgtatcttcaatggaagccgaacttgaagaagaatcagcatatgctacagaattagagatccttgtagatgaaacagtaaaaacattttttgaaactactgatatagtaactgatgatgtggtatcagttatgttgcaaggtattgatgaaacggcttctgatttagaaaattcagaagtaagagctagaaaaaatttagaaaaacttaaacagcttacagagcacaaaaaatttttgattggtcaaaataagctaagactttctaatcattgttgtcgattacaggaagttatactagaaaattctgatattactcatctagaagatgctgttaaaaggaatagacaaaggctagctcaccaagaagtcatgctaaaacaactagaagaaatatgtagtagaactcaagagaagcagctttttcaggaggagagaaataatagtattatggctgaggttgcttcattagaagatcttttttatacacagtgctctggagaggaagatcatgatgaaaatactgcttctactgagggtaattatactcaggagggaagttttgatgatatgccacctttagaaggagaggaagatgaggatattactgatcaacctcaacctctaagtcttcaggagaatcaagggaaccaaagcagtactatacaagaggatcaagaaggtaatagttcacaaggagggtctgtatcaggaccacattttatgtcaagctcgggttctaataattcccaagggggagctagtggtggaacatctacattaattcctggctataatgtacatagtcaaatgagctcactacagggattacaatgtgtccttttatctgctgttgaacaagtagcagagaatttaaaagtattaatattaaaagcaataaatgtatcaaaagaaaataagttcaatgtagcaagttttaactacagaacgtctaagaaaaatacttcttctcagaaacatttttctgcaaatgttccagcaaataaacaaggagtagatagtaggatagtttcctctttagacaagtttcatgtatttgctgttatggatagctatttaatgaatttagaaagtaaagttcgttcaggccaattaggtattatcacaaatattttttcagatttatctataggcttggcttatgctcataacaatagctcatctaaagaacatattggggcaatgtttggttcagttatagggtcagcaaaagcaaagatgaatactaatgcactttcagccattttcatatggaacactaataagacaggtttttctggttgtatttcaagttattatggctgggggcagatgaaaaatgctagacaatatttgcatactgaagaaatcataagttctaaagggtctcctgatattatgttaggagggggacttatccaattaggatataattgttttatttcaaaatcagtaatgattactccctatattgaatatctttttataacaacaggctggaaagaatataatgaaattacaggtactttgccttctcatataagcagtactaaggagcagttgattagtaagaacattggtattagaagtcgtataaatcttatgggaaattctcaacttcaaacatgggttacaggtgcttttggacaacgtaagctaggtacgattactgctcaaccattgaaatcgaccaactctatatataaagctatggtccaaaaagctaaaaataaatatgttcaaggggaaggaggtctctcatatgaaattatagttacaaataattgtaaaattggcctaagtggagatgtccagtttgaaaagaatagaccattgaagaacggtaatgtgagatgtttttttcaccttacatactaatctgatattattttataattgattcaatatatagtgattactccctattttaaaagatacaatagttctttatgtctttttttaatattattagaggataacatgggatttttactttaacctatttgtaataattaggtattcattttcttttaataaattttttatggtaaatattgatgaagccattcttcaaagcttaaaagtgaccatataaaaagacgcctattggcatttccttccagatgttcagttacaagctcatggactactttacgatcaaagtactcataaaggcgtacattttgtgaaaataaatatcgatggacaaagtctatactttcgcccctgaaccaagaagcatctggtgctgaaaatccttgtttaacagcctcaataatgtgagttgggacatatcgttccattgctctgcgaaggagccatttaccatcatttgtttttttataatagcggctagctttagctgattcattttcgttgattcttaatgtttcattgagtctatgaattttacaccttacaggtaaacgcatagcaaaatcaacaaggtcattatcaagaaatggaaggcgtgtttccaaactgtgtgccatagaaagtttatcttctacaactagtaatccatgtaagaaagttttagcttcaaaatagagggaacgattaatactttcttcatgactggttacaggagaattattatcaccaaatatattacgaaaaatatcacgtgtccgtacatgacgaacatgagtttcaataggtttgaacatgcttagtagatatcgattaggtataagtcgttgccagaataaataataacgatcaatatacttttcaaaactattttctcctttttctccaagagctctataataacgccaaggatatccaccaaaaagttcatcactaccagtaccagctagaacaactttaacaaattttgagaccaggtgtgctatacaaaaattgggataactttgtcctgtccgtggttcttctatatgccaagctaaacgaggaaatactcgttccatatctccagattttaggaccatttcatagtgttctgttttgaatagataagacattgcttctgctgcattacgttcatcaaaagcaagttctaaccctgaaatggaatggagatcaaagccacaagtaaatgatttaatatatgggaaacgtttagaagctaaagctgtaattgaacctgaatccattcctccagataaataagtacctagctcaacatcactttgcagctgacgctgtacagcctgctgaataagatatgttaattcttcttcatactctttatcagaatggatattcttactttcatcaaagcaataatcccaatattgtgaaaaagtaagttggcctgtatttaaaggtaaaatagcatagtgcccaggagggaatatatagacattatgcagtaatgttttatctgttagaatattttgaaaagtaaaatattctagtagggcttcataatctaatttcgtacagaattgtggataacgtaagaaggcttttgcctctgaactaaataaaaagttattttggatgatagtatagtataatggttttataccataacgatcacgagctataaatatttgttttcgaataacatcgtatataacaaagacaaacattccattaaattttgttacacattgcgctccccactgaatataagcatgaagaatgacttctgtgtcactacggctaataaatgtatgtcctaattttattagctctcgtcggatttcttcaaagttataaatttcaccattatatactatagtaaaaagtttatctgaagtagacattggttgtgctgcagcgtccgttagatcaagaattgcgagccgacagtgcccaagtgctatacatccatcaactacaacatttgccttgtctgggccacgatgtctaatagcatcgagcatatgacttaatacttcttttgaaggtttgtctccatctaaacaaattatgccacaaactccacacataatttacatctctttttaataattttggctaatagaattaatagtcctaaaagaggggaagggggggaatgaatttattactgattctataagacgctcaaaataatctttaactccaaagagggttttattagcaaatttgttacaatcttcaggagtaacatcaggtatattataaaattttcgtaaattactatattgttcaggactacaactattaagtgcaatatgaataggatgaaagttaaaaatatatacaccaggtaaggcgctattaaataggggtgttaaccatctttgaggttcaagaatagcaatatcgtcttcccatatgcaagagaagtgtagtaatgaacgtccatgaggagaaaatcgaataggtacaggttgtaaccctatatgtcctggtaaaaaagtagaaacttcattacaaatagatggaacttgttcttcaatataaacaaaaagtctactatcacgataaagactatgagaacgtatagacttagcttctggaacaatttgaagatatgattttaatatattttgataaaaaagtgtattatctttttttatattatgattaactaaaaagtttggatgaataccgagttcaaagcgatcattagatgctattttttttaagataggacttgtatttgtaacaaaaaaagtagctgtaatgtcaaattgtaaacagagttcaaaacataatgcaatacaccaatctggtgcccagtctgtatcaaaagtgattgcaattgcattttgcgtttgtatgggattaccaaaacaatcagttagcattgtctctttgcaacaactgtaatgcctgataattctgtcttcatagaaagaatattcaggttaagttcatcacaccattgagaaatttgctctggtgtctgccgatgagcattttgtggggcataccagtcaaagttaatatgttgcattgcatcaaaatctagctcttttgcatagaatgcttttaaaatgtaccaataaaaaaattcttgaagttttattttaccagctgggacatctaataattctatcccattaggaagattaagttccatattagattctccaagttgaatccctaattctgttaatggttttaaagcatcccatgcctgtttaggagacagtttatgtaattgttctcttaaataatcatctgaaaactctcgaataggactttttttagcataaacataaaaaagaaataagcctccattacgtaaaagaggagttaattttgttatggcttcttttgtagaatctgtatgatgtaacactccttctgaaaagatgatatctatactttcaggtttaaagggaagatccattaaattttcttgtaagaatataccatcatagcctgcatcctgtatgcgtctacgtgctattgtaatagcatcagagatatcgacaccaatataatttaattgatgaaaacaatctcccaaaagttctaatgtagaaaatgctgctccacaaccagcatctaaaaatatagggtggtcttggatagcctttaaatatatatatatatagtcataacggctttttaaccattcttgtgttttttttagcaatgctggtgaagtgtatgttttctcttggttccatttataactaaatatattacttgtttgaagttgtttgttactattagaattagttgttgatttccacactccatcgtccataatatattttttttgtctatcagcactaagaagtatatcattttttaaaaaacaaccggtattttttttaaaccattcaggcaatgatatcaaagacataaatcaatcctattacattaggttactactagataaattttcagccagtatagatataacttctttttgctcagctactgtcattgtatggaataaaggtaacgtacaacaatgtgtaaaagctttctgactaccattcatttctccttttattttacaaagtggatgttgttgaaagactggttgtagatgaagtgcataagttccaatttggatttctattcctgctttccgcatgtgatctaaaagttgatctctttgaggagtaataatacaaaagctttgccaagcatgagtgctatgactggttgtttctgggatctctataggaagtgactttaacagttctttgtataattgaacttgtgtagcccgttgtttgaggatggagtcaataagttgtatttgtccttctcctattgcagattgtatattagaaagtttataatttgtgccaagttgtataaaaatagtttctccttttagcttttttgagatatccataccaaaatgtttaatcgactggatagattcagctaactctttattattagttgttatcattccaccttcaccagtcgtaatattttttctaggatgcatactaaatacagcagcatctccccaagctccggttttgatattacgaaactgtgaacctaaagaacaagctgcatcctctatgatatttatattggggtattctttttttatacaaagtaattcatcccagttaagaggattcccaaaaagggagacagggatgatagctttagtcttggctgtaatagcttgttttatggcattatagtctattaacatagtatttggagatatatcgacaataacagcagttgcaccaagtaacataggtgcaaatgctgtagcaggataggtatagtcaggaacaatgacttcatccccaggtccaatatgtagagcacggagaacaagttcaagtcctgttgtgcaagaagtaactcctatagcatacgatgtccctatatattgagtaaaagctttttctaatcgttgtgtgtagatcccttctgttaacacccctgaattaagaacatctaaaacattttttttggatgagtttggtatataaggtttcattaatggtattcggaacataagttactttttacaaagattcattttggttgtttgtaaaatatttgtcctatatggttttcaggtagataagagacaacccaatggtcgcaactttcacaaggcattacaccagaaagattaatattttcatgcgcttgtcgtatactattatatgttggactattccaacaaacagctatacctttatttcggacatttgctatatgctgtccagtaacgcgtcgtgtccagtcatgattgcataatgcgacatcaccattccaatagattaccatgtcttcaaaaactttatggcaagctttgcgagctattttagttggttgtttaagacttcctattttaccatcctttgaatgttcttcataaatccttactctatctacttttggtaaccaaaaatctataaaattttgtatgtcagaagcattcttttctgtttttacagcagatacttgtactactataggtacctgtcgttcttcttgtcgttgaaggaaatacaggatattatttaggataatattataatccataccacgaatttcttgatagcattttggatctattgtatctattgaaaaagacaaaaaatctagaccaacattaagaagtttttctgtattttcatgtgttaataatgtagcatttgttgttaattggataggtccaacattatattccatcaggtattgtagtataatatcccattgagggtgcattaaactttcaccacgaaagaaaggaactactgttacaggtttataactagccatttctttaatcaactcatgagctagtgctacatccataatcccaaattcttgttccatatgatggcgtggacaaaatttacaggatagattacaataatttgttaattctaatgtgattctggatgggaaagaagacaaattcaaaaactcatacctcctttttattaatctatatatttaactttacatatataacataacttatttatattttatgtaatatttttgctggattgccgactacagttgctcctggtttaacatcttttgtgacaacagcgcccataccaattaaagcatattctccaattgttattcctcctcgaatgcaggcatttgttccaatataagctccttgttttatataacaatctccagctatactaactcctgcagctaaagatacaaaatcctctattattgtattatgatttataatggtattttgtagtatcaaaacatggttcccaatggttgtttctgcagctatcacagaaccaacaagagctgtactcccatgtccaattattgcagagcgtgcaacataagcgtatggactaataatagataaaaattgatgatcttttaatcctgaagaacgtataatattttgtttttgtgtataattttttggacttcctatactattaacaaaaaaggtatgctgaaattttatagcatcttttaattttcctaatataggaagattatggacttttgtagactgtaacatactagaatcatctaaaaatcctacacaagatagattactatttctaatattgatatctttaatagtatcaagaatatctatactatttcctctagcacctaaaataataatagttttatccataatatcacttggatctataaagaagttataattaaacttactatataaggttattttttaaaatacattacatttttattattttaaatatcaatataataggccataaaataaattctggaggataatatgtttccatcacgtaaaatttttataggactagaagatatagcttctataatcgaaaattatacacttggatttaattctcttggatttgatgtgttttctgttgttaatagtcaagcttcaatatgtgcaagcccttgtgatatagtattaaaagatcatctcccaccactaagacgtagaatgactatgcgacaaaaacaagaatatatacaaaaacgaataaaccttattagaaaagtttttgaaaaagcaataaaagagtgtgatatatttctttttatttggtccagcttttcccctgattattctgatcttccaatattaaaagcattaggtaaaaaaattatttttgtttttgtaggttcagactgtcgatggaggactgcctataatcaagatatgttacaacatggattagatattttacctcctggatttaatgatggtgaacaacaacttaaagagattacgttaagattgattatggcagaaaagtatgcagatgcactttttaatactccaagtcaggcaggactagccttaagaccttactataattatttacaatatccgcttaatgcaaaaaaatatgagtctaataatcctcaaaataaaattccagttatactacatgctccaagtgatagattcaaaaaaggctctgatatgatagaggctatttttttacagcttcaaaaagatggcctccaatttactccacgtgttgttcaaggtgttccacacaataaagctatagagatatataaagaagtagatatccttgcaggacaacttggtactgttacaggaggaaaacaagaaagggaattaatggcatgtagaaaagttgttgtttcagggttaaaaccagaagattatccacaattattgtctcctgattgtcctaatgtccgaagccattcattaagagatatgtacatggcacttaaaatgttaatccctaatgtttctcttcgagaaaaaatagcatcttgtggaccaagttatgtccgtacatatcatgacccttctactgcatgtgctaaatatcttgatgcaattaatggtactacttcacctgattttattccacgttttttgcgagatacgtttgtaccagaaaagaaatatttacctgtttataatacaagaataaagcttgtacaggactgtccttggtataaagagtatatagaaccaggaactagattaggcctagttttttaaaactagacaataaattttatctattcgttatgttataaaatacaaatagattctattacatatttacacactactttaaggtcatcatggacgatatattagattggttaaaagaaaatactaatcatactttttctacttacgtaaaaagtaaagaaggtgcttggattttccccacacactctcccaggtcatgaggataatgctatatggaataatacaaaattaggacaattagctcaaagaaaatattcaactactgcttgggagactgactttcttgagcaattgttaccttctttaataacctcccataacttatgtatagatataccatttatagacgtgggctgtggtgatgggaggataacatatttacttcatcgggttggctttaataaacttgtgggaatagacttagatgaaataaatgtaaggaatgctgcttctcaaactcctagctcatctttaaataacattgtctttatgacaggtgatgcactatctttgcctttcaaacataatacattacaacaaatatttattagtgggctaccctctctttcaaacgtatttttgaatatatatccttttttaacagatagctctatgggggggggggggatactcctttgtcttacagcaaccgcattagaagcagctcttatttatgctcttactagaggagattggaaagaatttatccatattatagaaacacaaactcgtgctgcttcttgggaaaacaaaaatattcgctatcctattacaatagtagaaaatgttattaatgaagccaaacaagctggattctctttagaagctaagtatggcatccctatttttgctagtcttgtctttggtgcattatgtcaacaacaaactcttaatgaagatgataaagaactattatataatatattatatacaattccttccataaatctacattttatgagacaatcccttcttatctttagaaaacaataaaattttatatctaactataacctcttttaactaaatcaaaatataatgtatactataaccatctataatagtaataatttctaaattatgtatagcactctaacttggttaaaagaaaacactgacactacattttcttattatacaaaaagtaaagaaggtgcttggatttctccatatactcttccagggcatgaggataatgctatatggaataatacaacactagggaaatcagttttaaacaaatattcaaccacttcttgggaaactgactttcttgaacaattattaccttctttaataacttcacataaactatgtagtgatacgccattaatagacctaggttgtggtaatggaagagtcacatatttgcttcatcgagttggttttaataagcttgttggaatagacctagatgaaatgaatgtaaattatgctgcttctcaaattcctgcttcatctttagatgacattatttttatgatgggaaatacattacatttaccttttaaacaacaatcattatcacaaatttttatcagtgcattaccatttttaacgactgttttctcatctataaaaccattaattaaacaaaacgggaaattactttaccttacatctacttcattagaagcagctcttacttatgctttagttaggaatgattgggaagaattcgtccgtattatggaaacacaaacccgtgctgctgcttgggaaaataaaagtattcgttacactacacccatagcagaagcaattataatgtatgctgaagaggctggcttctctttagaagctcagtatggcattcctatctttgccagccttatctttggtgcattatgtcaacaacaaactcttaatgaagataaaaaagaattcttatataataaattgcatgaacttgcctctataagcaaccgatttgtacgtcaacatttacttatctttcaaaaagaataacaaactgtgattactcattcaaaaaccagtctctctactgacgatatcaccaatgttttagcaacattattatcaggggatattagcgataataaggaacgtaaaaattttgaaaaagcaatggctaaatatgtaggaaatgcttattcagtagcaacaagtagtggaacattagcacttcagttagcattacgtcttatgaaaataggggggggggacgaaatattggtccctacatttgtttgtgatgatattttatctgctgtacatcaagtaggggcaaaagctattcctgtagatatagatacaacaacttttaacataaacccagaggatgcagtatcacgtattacaaaaaaaacaaaagctattatccttgttcacatgtttggattaccaaatgaaatggaaaaatttcaaaatttccctgtaccaatcatagaagattgtgctcatagtttaggagctacatggaataaaaagtttgtaggaacttttggccatatttctacattttcctttcatgggctaaaactactaacatgtggggaaggaggaatgcttatgacaaattcacaaaaaattattcaacatcataaagaaatattagaaccaaattttatgactggtggttataagttagattatcatcttagtgacatcctagcaaaacttggtttaagccagttacaatctttcccttcagttttaaaattaagacaagaaatggccattaggtatacaaaaacattaacaaatttatctcaaacatttcttcctataattaaaacaaaaaatcaaatatctagttgtttccgatatgtcttacgacataaaacattacaattttcaactcttgaaaaaatgtttataaatcgtggtattattataaggaggccagtaaaaaatttacttcataggcttttaggattaaaagataataactatcctatagcttcagaatattttgaacatatcttttctattcctttttatccttcactaactaaactagaagaaaaaactgttttacatgagacaaaaacaattcttggctgatagattatggcaaatatcttacttacatctgttggaaatgatggtgcacaagctattataaaagcattaagaattccagaagggaataatgatatagacactctcattggtatagatagtaatcctcatgcctatggtctttatatgacagattatagttatattgtctctcaaagatctaatgctacttctttactagaagaattacaccatattattaatatacaccatattaatcttgttttaccattatcgacagaagatcaatctttttatgcacactatgcctctaaaatagagcaatggggctgtaaagtacaacattctcctgaaaagtctatcacaatagctaataataaacatctactacttccttttctacaagaacatggtttagaagtaccatattttcgtatagctcataactgtactgagctagaaaatcttttatatgaatttgatgctaaacataatcctattgtaataaaacgagcatttagtactggagcatgtggtgtaaaaattgttatcccatcaactgatacactagaaagaatgtttgatagaactaatatttatatttcaatcgatgaattactcttttggatggataaaattaatgatacaatgccaatattacaaatatctgaatttctacctgacacaaaatatagtgtagatgtttttcttcacaatggtaaagcgattgaagcatgtgtccgcacagaagaaaagcgtatttatggcacatcattatatggtgttacaattgaagatgaagaattatatgaaattggtttacaagctgcatcttctctattgttagaagggactgttaatatagagttagggaaagatagaaataaaagagctaaaattatagaaattaatccacgatttcctgcaagtattgatcatacagtaaccgctggttgtaatatgccactctgggtcgtacaagcagcattagggaaaccttttaaagttaataagccttattataatgtgccttattttcgtcattggacatttttatctaataaaaatataccattaaaaattggtaggaaatagatgatagtacctcccaaaatgacaaaagctcaaataggagccttagaagaacgacttttttctgggaactgatctagtaaagatattgacctcttgtcttctttatatcaacaacaaaataacatagcacaatggggacgtataactgatattaaaaataaagctaatgaacttatatatatatatataagaaaagaaaaaatcttcttgcaaaagaatgctacattttctcataagtcaggggtctatatatttccttttacaaaaaagaataactttttaaatccatcagaacaacacaatatctttcttctttgttacctattaaaagaatctatttatgatgagcttattatagatagtaaaatctacacagaacatattgaaattgcactatttttaatagaatgttgcaacttatataacaaaaaatgtcgtattgtagataaagaactgcctaatattgtatccgatacaaatgatacaaaacaagttcaaaaaatgttaatgcttccatctgaaatagctatattaccactaactgggacctgtaatgtaaagtgtcgcttttgtgaacaagcttatacaaaaattccataccggaaaatggattttgatatattttgtcaaacaattaatgccatcccagataaaatgttcataaaagtaggtctgacaccttttcaagaacctctttctacaaaagtttttaatcgttatcttgaatatgcactaaaaatacgtccagaagctaatatatcatttaatactaatggaacatttcttactaaggaggtaagccaatggctagtagatattggtctgaaaactattgtaatctctcttaatatgcctgatcctgtaagttaccaaaattttataggtaaaaatctttttaacaaagttgtttctaatatagaaacattatgctgtattaaaaaacaacaaaatagtcgttatcctaaagtaattgtacaatatttgaagctacctccagttcttgggcaagaatctgtattacaacaacgatggggaaatatagctgatactgtttggtttcgtaatgtagctgctcctacaagtgatcctcaaaaattagcagcatttaaaaaaattaatccacaattaccagaaaccagccttctaggagaagaagctctaccctgtatgagtactatggtcacctgcgctattgatatgtttggctattatcttccttgttgcacaacgcttatcgaaagatgtaattcaggcaaaagaaaatttaaatttttagaatttggtcatgttacaaacatggatgtacaaactgcatggagtagcaaaaaactacaacaaatacgggcctggcaattagctggtcttattggctcatgcaatcgttgtacaagtaatcaatcaaatttagtacaactctattcattaaaaaacggtattatacaaaattgttatttacgtaatataaaaaaatacaaatagtatcttttattccaaatgcaaaggaggaaaccctactccatataaatatgttgtagaggtatccagacctaacgattgtaatgcatcattacgttcttgctgtggtaatgtcctagttactaatctacagcctaaacacattttgtttttatagagttcaaacctattatttattgtattacgtattaatgttacacgttcattatgccaaatcttatcaaggtcccataattcttcttcagctatggaaatgtttggttcaccataacagcaatatgttatacatcttttcccttttgagtctaagtgtaaccatatatatatatatggatgaaagcaaatactagcattactattatttttagaaatatactgtaattcaatattttttgtttttgcatatgataacaatttttttaaatctattacctttgtaatatcacaccatgaatcatctggtagtgtataatcaaacttatggacaggtggtatataaaaacctattcttacagcgttaaagccataataacttgcaacatctattaacggataaatatcatctaacacttccttacaagcaatgagccctaactgcacatacatattgctaggtttcatcttacttagtaactcaaaatttctcattgcccttttataagagcccttataaatgatattttcatatgtttttttccttatagcattttgatatatatactttatctacacattgaattgttgcagataaatttttcccatataaatttaatccatttgtatataacataatagatgcatctggagcgtatcttctaataatatcaataatagctggatattgatgatgcattaaagcttcaccatttccacatatgacaatttcctttgtatattttaaccatgtcatccgtttaacaacttcaagaggaatttcaacaggatgatgccttgcctctttaggttaaaaaaacaaaaacgacatcgttgttgacatatattagtaagacttaaggtaacaaaagaaggtactggggggatttcaacattaatatcaccactatctaaaataggaaaagatacactcatttgagctccttttgtctatgtaatattagtgcatgatacctttataaacctaatttataattattatattctattaaattaaaatattacaatagatcacattaaattaactaattttaatttaatagaattatattatagaactaaaaggtataaatatattaagtgtgataactacgtgtaattatcacacttaatatatttatacctttacttcatagttatggataatctaatttataattatccatacataaattttatggaatgaaaaaataatatattaactagatacttaattgatattttgttttttgcatataagataacattttatcaattaattttgcaaaagctccattacctaaaacatttgctgcagtaatcactggatcaaataaaatataaagagctgtaattaatgataacatttctgaattaaaacctaaataactttcaagcagtggaagcataacaatgattccacctcctgggacggctacaacagaaaactttgcaaggataaaataaaaaataaaaactatataagttactaaagacggctcctctataccaaaaccttttaatatagcataagctaaaataggtattgcaaaacaatcaccaataaggtgaatgttaattgttgctggaactacagcacgaacaacatctttattctttgtattactttctaatcccataatcaaaagtggcatacttgcagcactagacatagtactaaaaccacttatcacagcaggaaagactcttttaatattattaaaaacccttataaaagaaaacttatttaataatagataacagataataatatatgtaaactgactgatagcaatcaaagaaaaaattaaagcatattctttagtaagtagttctaatataccatcatgctgcatttttataacaaatcctacaacaaataatggaacaaaaaatataaaattatttaaaaagctttctatatatatttcaatagtcactgcaagttgttctgctttctttgggaaaaatgtagatgcaaagatacctagtataacaccagtaatcattgcatcactattcgaaataatatttggtaaatgtaataaccataatgtagtaagattatctatattatgaaattgtaacttagctaaatcagaactatatatccatatcccaatataatgactaataaaggttgataaaaaattagagcaacacacaaaaacaactattattcctataactttagtcgcatttctagatagaataacagatgctttaaataataaactaaatataatgaaaggaagtataaacaatataatagactttatacttaagctaatagaatataaaagttgctttatatataaagggataatagggcttagtaaaactataaatataatcattattgccataataaaaggcatcttacgaaacatatttccccctttggaaatatttattatttacgtgtaaaatatggaaaaattaaatagttttaggaatgataaaagacgcttaccggcataagccggtagtttttataaaaaaaagaggaataatattacataaagggaaaaacatctgttaacctactattatactaaaaacatctttcttaaaggagcataaacataaaagaatgtcaaaagctttttcaaaaaaaaatttgaaacttactgtctaatattattaaatctattcacagttaaaactcttatatatacttttatattttttataactaaatataatccatcacaaaatataaaggatataactgttaagtagaataaaacaatattttcccatcatcacaaactatgtattgataaaattagttgtaaaaatttaacttcccctattttaaaaaactcctgacaaaacaatataaggcatcaaaaaactactaagcaatgccatccttttcttaaaaagaagaaaaaagttctctttatatctaattaaattaacaaaaaattttttaattatttcttattgtcttattcccattggttatacacagttattaaattctatagaattatatatgaatagttatcaatttataattgctacctgtacctattaatatatatctatgtaaactaattaataactattcatcaactatatgtaagttaatcactaataattcctaactaacactaaatgttggatagaaagtataacctttctatttcaattccccataaattaatataagctgattctaactgagaatatattgatatttcttatcaaatcaatatgatagtatcatatgtattataaatattatataatgtgttagggatgaaaatgtgcttatcttaaaaattagtgctaactaagataggttactgagaacctataatataacttttctacatataaacataaaagattacttttttagttgggaatagtgttgggatacataaaaaatttataattagactttttaaaaatttactaataatataaatagttagaaaatatattatgtaactatatcgttggattaagaatccaagaatacaattagctaactatatacaatatatcatctagatagataatttttaatgaagccactcccgcagtatatattttacccaatcatattcccttcccaacggttacttaaaaagcctctcattcattatcaccttctacttcaaaaatatcagttacatactgtagtaataatacattcctatcattatacatcccactaatacgacttaacacttcatctatatttttaaaatatactcaaagcccatattatacttcaataaatatataccatacgttaaagcaaataactatttatttatataaaaagtagttacttttagttagcaataatatacaatgtttttattctataaacagtttgttagatgatgttatttaataaaattatattagttgaatatgtagataacggcataaaaatacagcaagtataattgatagatacataaaaaagacagatgttatttattgaagagaactacatatcgatatctagactaataaaaacggtcaacatgtttcaatactagaaataatcattaataatgttctatttgtaaagattgaaacagaagacacctctgaagctccaaatgaaattttaatacactatgcctttcatccccctaccatgggagtaaattctatccctttttggttagaaaacttatttaactatattttgtttacttattcttttctcatatttttttgtatacaattctatagcgtttttaatatcttcctcctgtgattctaagtacgaatctattatatgtataataaactttttaattgttgaataatcccaattgcaagcgctctaatagtttctatttgtgacttataaacagcaaaggttattttttatttcttcttctgaattaaaattgattttccccctttctcactgtttaagctcaccttcatctataatctcactttctttatcttttaatgtatcagatgaaagattttaaattctcaagagttaaataacgtatgtaaaaaaatacaatagagcttattctagccatttttatattatataagatacataattttgttatactttttacataaatgactactgacagtaatcattagtgacattttcttttttttcatgtaataattaacctaacttatagatttcttaggggagaagtaatgatgttaggtcgcatgttaggtagtctattaggaaaattttttgataaagtttttcctgaccgctcaacacattgaagttcaaagtacagttaatgaagcagagctttaaggtatacttacttctatccttagtttatgaagaaactttttaggatgggttttggccattgctttttcctgggaagaaatagggcaactcatggtcataccagtgtttctcctgatatagggaataaactcttaaaatttcaattaaagcagattagcacattattgctaggaaaatgttaaggttaggatggtaaagtatggatgaaaaaacaggaacaatgtggtctaaagttaagtatggattagggaaagtgttcataggtctttctgtctatttagttgtttctgtagtcacagcattattcaccaatctcatcttattaaatcgtatggatgaacgtgttcaagctatagagtattcttataagcaacaggacaaaaattttgcaagtgatttacggagttatgagtcttggttgaaagcaattacacaaaaggtagatgtattacaaccacgtgtgatccaagtagaagctagagttgagtatacacaacactgtcttgaagaattaaaaaagaggttgaattgatataggttgaaagtagtttgaaaatgctacgaaaaaatgtgttaaggtagtctttgtaatgtattggtggcgtgtaaattcccaatagaatagagttgttactgtttattatcaatcatctgatctagttgcatatgagtatccctttgattcatatgtaacttattttcaaagactcctcatagacaaaaagtctatgaaaatatcttcaaaaaagaaggtgttttttagaaaatttattattaaacgtatcctccctctttgtactttagagcttaagggtaaaaatatattatatgatactgtcccccgtaagtctcttagtataattttttgaatttgattgaggataaagtcaagatattataattggtggtgacatgaaagagattataaatggccttttaagccttattgttttattgatttgttctccgatcttattaatatctatacttatttttttattggcttatttttaatatttttttctgttggaataatatcaatttcaaatattattttggaacattttcaaaaatcaggatagctgtgacagattatacaaagaactatcttcgtgcaaagaataaatattttctggaatgtgttagacagtctaaaaaaaaaaaaagcaacatatcagaccaaataataatcatatttcactagctttcctgtctgttgaaattctttcttctttgtaagaacagatccataagaagaatcctcaagctcataaaataattgctgtacatgcttttcaacttcttcctgtgtttttacttctcctcttttaatttgttctgcaccttcatatttaatatagctacaatataaacattattgcttataagtaaaagttttaaaaggattataagatattagacatagctatattaccaaaacaacctgaaagtatgactttgccttttactacaactggttattatacaggagttagccctgctgagaacgacagatatacagctgataattcccttctgttgagtctacatgagatggtaattgaccaaaatggacaggtaatacatgaatctaaagaaagattcttatgctcaagaaaactgacctaagggggcaacctataaaaatttgtctcttatatgggagcaagcatagagcattactagggggagctataacaagccaaataaagaacaaaaagatatattaacaaaacaaataaataaaatgctgttaaaattgtaggatataaatattgatattcgctagttagagaggaaagtgattagaataacagtaataaataatgataacagcaagttacaagagttaaatagaaatgaagaggttattaataaactaaatgtattatgattttaactgattaataaaactaaataataaattatactataaagttatctaacggtttataatacgtttgtaataatctttataagtttgataattcataataagaactaaaaaaaattattatcgtataatttattatttaactttgaataaatacaatacctgttatctaacaacttaattgtctttttgtataattttttattgtttttatagatattaaatagttacttattataataagttgttttatatactttctagttattcaatagtagctattgctatatttaatataatagtattattgacttaataagtaatatataatattatttgatatattttaatctagttctagtcaataaaaaatctttaacaacgcactagagtaactagtaaaatctgacaccaaacaagtgttaattacttaactagctaagctagttagatagttttttgtgcttttggtaacactaaattaaataaaatgacaccataagaaataatatatatccttttcttcttttttagaaagaagaagtttttaacgatagtaaaactatttattattaatactaactataattaatctattattaagatataacaaaatattatacatttttttttataaaaactaggttagatttataaatctatataagtatgattcatctatttaaagatattaataaacatttttttacaattagtttaatatacacatatatatatataagcataattatacataatataaaaagtatagttaatatagctatattatctatgttttctattcttatatgttatacaaatgctttttgtataaataatacaaaagaatctggtggattaattaagcataatgtacgagcccaaatagcagaagaaagaaaaaaggcaaaagcagaaggacgacttgaagaattcgaaaaaaatttgaaagcaaaaagagccgaagaacaaaaacaaagagtcgcagcttggaaagcaaaaaaaagggaagaaaaaaaattatcacaaacagaagaagaaagaaaaaaaagcgaagcacatagaaaaggacaattaaaacgcattgaaagaaggcaagaagttaacaaacggatagaaatagccatcagagaagggaacgaagatgaagttcggagaacaatttctcaagaagaaatacaaatcaaaaaagaaagagatttaaaatataaagaagaaaaaaaagctaaaatattgataaaaaatcctccactaacagaatttgaaaaactacgtagagtagctattagtgaaactcaaactgaacgtcatgcaaatgataaaatattagctaaaaaagaagaggaattaataaaaattgagtcagctgatattgttaaagaaaaaatcaaaagagaaaagttacaacgtattaaacaaaatagagcaagatggagttcaaaaaatagagaaactaaaagagcagaactatctgaagaggagagaaaaaaatcagaagcacgtagtcagggacaaaaagaacgccaacagcaacataaagaaataaagaaaaagcttcaaaaagcattgaaagaaggaaagttagaggaggtaaaaaaggaaatagagcttagtaagttagaaagaaaaaaatttttaaaaaacagacaattaatacgtaatgcgacaaaacatgcagaaaaacaaatggcaatgtggttatctttaccagaagatgaaaaaaatcgtaggatgaaaattagtcaacggtgctcagaatatcattcttccatgaaaaaaataaggaaaaagtctaaatctgctgaagagtcagggtgtatggaacaatttttagaagcttttagtgaagaattacaacttaaggaggagacagttaaaaggaaaaagaaaatacaaaaagaacaaaaaaagaaaaagaaaaaagaaaagcagtcaaaaaaacaaaatatagatacaggtcaagaaccagagcctccattaatggaggatgagtattgttttcttttaggtgatcttcaaccatcttttttaccatctgaagaaatactcttagagccagatcaaacttttctattagatttagaaacaattgatccatcaagcttagatctacaaatttttcaggaagaaagtactagtacatatagggaaatcgcttttagtaatagtaattctgagggtgataactctaataatataccttctctaaaagacaatgcattacaacaatcagaagaaatacaatgtacagagacagctatttctgaatgtaataatactattaaagagttagatttgatagaaggagattctatatcttctcagcaacctaaggggaaacagtcttcattaacagcaagtattgtaataaatcaaactcatagtaacgaattacaaatattatcttatattgatgggtataataaaaaatcacaactatcttctttaaaaagtttacaaaatcttttttatagtcctaaggaacaaatgttagctaggctaaaaacttttgttttacagagtagctttatgccaagtgatgttaactattatgaatatgatagtgaagatagtaccaatacaatgctacaatatccaactatgctttctaacatagttaaaaatagctgttcaaatctcaaacagtataatttttttggttatagtaaaaataatagtaaaaacttagaacttaaaccatatagttatcaaataggtattattacaaatataaaatcaggtttatctctctcattggcttacaatcgagataaagataaaatttcttctttttcacatatgataatggagtcattttgtagtcctgcacagtcaactataagttcagattgtctctcaagcctttttatatgggatcccagctattcaggatttaagggatatatagttagtgcttatgggtgggggcaaatgaaaaatatacgctatgcaatacataataaaaaagaaatttgcacaaaaggggagactaccgttaccatatatggctctctttatcggttaggatataccttccctttgggaaagagtataatgtttacaccatatatagagaacagttttgtgcagatagcatgggaaagttataatgaacattttggtgttcttccttgtaaaattagtagttataaagagaaaatgtatgaaaggaacataggggtacatatttcttggacagataacgactgttctttattacaagcatggactgtaataaataataaaaggcatatatcaagtaagatagaagcaattccacttagttcacctaagtcttttttttatttatctcagatcccaaaaaataaaaaagaatatactcaaaaagaaattgggatatcctataaaaggaaaattatagaggaaatggctattacttttgacagtaaatttttctatgcaaaacataataatggaaaagaagtggaatgtagtattcattatatcttttaatatagtatttacctaacaatagttaacttataaaaataattatatatatatatattaaatagttaaaataatagtatcctgtgtattaatatgctttttaatcaaggttttctcaatgctatgtttagctaaacatcattgaaagatataataacctcctggatatcttgttttatgtcttgttatttttggtataataaaaacctggggctgtttattttactattttgtttttattttattttttaccctattaatgtattaacaatctttcacatagacaaaaaaatatgtttttggaatgatcatccaagaatacaattatctgatttttttatcccatataaacagctccaaataaagggataggataaaactaattagtataaggtataaccagctgtatgccaaaaataacaagacataaaacaagatatccaggagtttattatatctttcaacgacgtttagataagcatggcgttgagaaaacgttttatattctttatagacgatgtggagaaaaaaaacttattgaagaacctgtaggccgtgaatcatctggaatgactgcagcaacagcaaataatattcgtggacttcgggctattgggaaagaactttctaatgttgaaaaaagaaaaaaagaaaaagaaaaacaacaaaatcaaaaagttacattgcaaactatttgggataaatatcaactaatttactcagaaaaaaaatccttaaaacaggatataagtagagtaaaatacttatctgatttaatgcataaaagtcctgatatccttacaacaaatgatattgatacgctgagaaaaaaattaacattaacaaaaagttctaaagggggagcaagcttatcaccagcttcaataaaacatattttagtattacttaaaaggttgatcaactttggtattcaaagaaatttatgtataaaaccacaaaatttatatattgatatgccaaaggttgataatcaaaaaacagaaattctttctaagaatcaattaaaaaatcttctacttgcgcttgatgctgaacccaaccagtcagatgttgcctttattcgtttagcactagttacaggaatgagaaaaagtgcattattagctcttaaatggtctgactgtgactttgaaaataatatcattacactttctgggaattatgcaaaaaaagggaaaacagattatattcctatgaataactctgcaaagtcaattttattatctatcccaaaaggaaatagtgattttatttttgcaacacgtaatggaacaaaaagaacaacttataatcagcggttaataaaaagaataaaagaaaaagcaaaattaccaaaagactttagaccgcttcatgggttacgtcataattttgcctctaggttagcttcaagtggaaaagtagatttgtatactattcaacgactactaactcatgaaacacctgctatgacacaacgatatgcacatctacataatgatgcattaaaaaaagctgctgctattattgatgatgaatttacggaaacattaagttagacaacatacatttattataaatgtataaaatctataatttttatgtacatatagttgtatatatcattatactataaaatatactatattaattatctgataatatacctataaaataataactgttgttacagcttatgtaactttaactgactaatatataaaaaatgtatatgatatattattatatattaaaaataggttaattgtaattaataatagtaaaaaaaatactcatcaaatttttaataaactatttctcttttttcttaaaaaataagacaagatatataatatccatttaagtgatacttaatttattttagtgttaccaacaaaataaaaaactgtctaactaagctaatcaacttaatatccaatcatattaactctttttatcaatatgtgaatattagtcgagcaaaataaaaaatttttacgtactatacatatactacatattatacatataatatagacagaatgtctacattgtataatatatataatatgtagtatatttgttatatgtagtatatgtatagtacgtaccatattaatagtactttacatatagactatatataacatatgttttatactaaaaaacatacatcataaaataaaaaaggatatattttgtgaaagaaatcatagcaattattaatcaaaaaggtggcgtagggaaaagcaccacagcattagcattaggagctggcttaattaatagaggatatagcgtacttttcattgacctagatgcacaagggaatttaacacatacactagggattcaatctacaaacttaacttctgtagatctattagcaaaacgaatgagtataaaagaagtcctacaagatacaaaaaaaggtactgtaataccagcaagtccaacattagcaggtgcagatactgtaataactgatgtaggaaaagaatatagactaaaagaagcattaagtgatgtattaaacgactatgactatgctgtaatagatacgcctcctgcattaggagtattaacaataaatgcccttacagcatgttcaagtatagtcattcctgcacaagctgatatttatagcttacaaggtattcatcaactccatcagacgatcagcacagtaaaacaatattgtaattcaggactaaaagtaaaaggaattttacttacacgttacaatactagatctatattaagtagagaccttactgaaattatagaacaaactgcacaaaaactagatacaaagctgtttacttctactattcgagaagcaattgctataaaagaaagtcaagttcatcaacaagacatatatacatatgctcctaaaagtaacgtggctttagattatgaaaattttgtagaagaatttttgagaaggaattagttatatggttaaaagaaaaaactttaaaaataaccctgtattacagtttattagtacagaacatatagaacatgaagataacaatgatcatatagataatcttcaacatacagatgttgatgctaaaactaatcatatagaatatacgaaagatacacatgttactcatagtgaaacggatcaaaatagtatacctaataaccacaaatcaaaagaaataaaaaataaaaggcttactgtactcctaaaaccatcaatttttgaaaatgcagctaaactttcaggattaaaaagaacaagtgtaaataatacaatcaataaagcattagaagaatatatacagaaacatgaagagatattaaaaaaatatga

SEQ ID NO: 8738 - DNA, 194553 bp, Lawsonia intracellularis
atatcttagttatattgttttctacttatcttattatttatactaagtggggtaacttatgggaaatattgattaattgtcaatatatttttatatataacaacatgtctttaatagattgttagtttacctcctctagttaacttaatcctgattaagttaactagaggaggtaaagaacagtagatattattcagattgtcagtaatggcttggaattaaagagaattttttataagaaaaaatgtacttcaaaaaagacgtataaagcatttttttatacaatacaggtaaaaacacctgtgaagaaaaaaaaaggcttatacccaaaatatgaagctattttgttttacaactagaaactttactcatatccagttttggataacatatgtaatagaatatattgtttgtctaatagatatattgtagataatgttttctgttgaaagagttctatatttttttagcatttttagtaagtaagatagtaaaaataggtaatattgcagtatagagaacgtatgaaaaattatttttcttcagatacacaaggaaagcttattgggcagatttcatcagatgtacctttgttacataccttacaagaagtggaacaaacttggagtcctcttagtataaaaagaatattagtacatttcagatctagtcgacaatatgaacgtgttattgattatattaacattcaagaagacttattacctaatgagcgtgttattttattctttttacatgcagtctatgatgattcttttgctactatggaattatatgcacggtatattactgatcttataaattatgtccaaaaagactttcatcatattacttcacaagatgtagacgcatttattcgttacagacaacttaatggatcaaagcctgctacaattaatactattataggcgcattaaaaagtttttttcgtcatttagtagatgcaggtattttaacattgaatcccactgcctttttaaagaaaaggcgtaatgatactaaacaaaatttaccaggacatctatctcatagtttaagtgaatcagagttacaacgtctttttgacgggatgatagaacaaggcgcatcattacgtgatcaagcattaatgcaagtgttgtttcttacaggaattcgtgcagaagaagctgtacgtttaaaatggagtcatatagtaacatggcaatcaagatggtatttggatgtatttgggaaaggaagtaaaagacgtagagtgtatttacctatacaagcacttacagttattcaagagtatggcaaactattgggcattgaattaggattagcaagtaactcaaaacccctctttgctcatttacggagacctaatgaacatattagtcggcatggactctatgtattagtaaaaaaatggtgcaagagactgttaggtagaacggacgtttctccacattggttccgtcatagttgctttacccaacttgctcataagggtgctagtcttgagagcattaaagctcttgcaggtcatgagtctgttgagacaactatgcaatataatgaagctgcacaattaatgcagcctgctggtattctatttgaaaaataaaaacataatatatattataactatttaactatgttgcaataattattcaatattttttgagaatatgcagcttcactattaaagtctagattataaaattgtcctttttcattgtatggtgaagccttatgtgaaaataatgtgaaacaatctgctattggacttcttccccatgtgatgatttcttgacaaataatttttcctccatattgcttaattaaataagcaacatcagcagcagaaacatttgggtttctataatgtggattctcctctaaagtagccagcgagtctgcaagagtcattttaaaatttgaatggtgtataaaacatacaccattagatgtaagtaactgtgtaagtatttgttggatatatgcattaagaacatcaagatctacatggacaagagaatcaaaagaaaaaataaagtcatatttttggtaagcagctgcttgaagagataacccatcgtttacaaaaaatttacaatttttataccatataaattttttttacaatgagctatgcaaggagaagctaaatctataccacaataacttctataaggataagatagaagaaattttgtccagcgtccaaatcctggtgcaatttctaaaatactatttttagggataaaagaaaaaagaaattttgggagctgattagagtgaagagattgttttaaggctattttttcaggggaaaaagggtgaatacgtggtaaaatagttgtaatccattgagattctgaggaaccccactttttagaccactcctcgccttcttcagaccattctttattattccagactgttttattccaaccaatatcgccaaaagtatgttccaatgtactctcctacagatggctcttaaggaaagagctgccttatgttgtagtgagtagccagtatatatatatatataggttaaaacaagtaaaaataatctatctattttattgattatacttcaaatttttatgtctctattttatataggatctttctttatttctaacataatagaaggattgaattatgaaaatattgactcatgcacagctagaagatgaaggatttttctttgactctggttttcgtggttggatttcttctcatcatacccttctaaatacaaaaggagaaccagatcacacagataaacatacactagagaatttagaaattctttgttcttatatgaatcaagaagtaccaaatattcttacagaaatacaaggtgttcggagcatattcccagaggtaaaaaaaagctgtcttgaggccaaacaacataactttggtgtttctgttcgatatggtgatcctcaatttatgagtgctggaggtacattatcttcaagagtacatttcatatatgaagtacaacaacaagttgctaaaggaatctacgactatatcaatgaaatatacctttttggtattggaggaagaaaaatatatggattattaaattatcctacactatttcaacccattgcaccacttcctacaggagaaaattcgtctcctttgtggtccaaaaaagatgtagaacaatggtataaagatattgatgaattatataagacacttcaacgtcaaacctttaatcatgtaacgcttgaaactcctacagttctttgcatttcagctcagttagatacttatttaggtcaaaaacataccaaaaaattgttacaacagatggtaaatgaaacatatccacgtttacaatttgtaactattgatggcttatccatatctgggataggtgaatctatgttgcttattgcaaaagaattacacggtaaaaaaacaggagaatttgtgtatagtgaaagattaagaacatatcctgttatccctgggaaagaagaactaacacaaaaatggtcggcaagtacctatggttgtgtgattcatattcctgaagctatagcttatatgagaggactctaaagatgacttaaaagttagagttgctgattaatgataaatgattatataaagcatatgattctaatacgacattgtaagtttattatccatatgaaataacaataaatataaaatatattctattcactgctgtaataattattggatagaactcctctggaggaggatgagttatgtcgccacgaaaattacatgtgcttcatataacatcaagagctgactttggtggtggaccagagcatgtctatcagattttacgacacagtccaggacagtggaacaattttgttgcttgtcctttagatagaccatatgctgaacgatataaaaatctattaggaataaatggcatttgttttattcctcatagaaagttttcagtaaaaaccctatgggatcttagacaattcatcaaaaaaaatgcaatagatcttattcattcccacggtaaaggtgcaggtgtttattctcgcttattacatgtattaacaaatattccttgtgtgcatacgtatcatggttcaaatataaactcatattcagcagtaaagtctaaactttatagactctatgaacagcttatgggtaatgttacacaacgtgctattgttgtttcgccaagtgaacaggaatatgtgttacaagaaaaattaattcccacagaacggcttacttatattccaaatggtgttgtttttcctgaaaaaatagatacagaggaaaaacatgagcgttttcaaattatttctattacacggtttgataaatataaaaatacagaatttgtcattcctattctacatagattaaaagaagaacaacaaatacatcaagtccaactagtgttaattggtgatggacctgagaggaaagtacttgaagaacgattaaaatcagaggatctttcacaatatgttatctttacagggaatgtactctcttcagctccctatctgcaaaaagcaaatgtatatttaagtacgtcatgctgggaaggtatgccattaggtgtgttagaagctatgtcttatggtttacctgtggttgcttcagatgttaaaggtaattgtgatgctgtagaacatgaagaaacaggattcctctatccttacaataatgcctatgaagcatctaaggccttaatttgtttaatgaattctcccaaaatggtaaaacagttcagtcaagctgctagagaacgtgttcgaaaattttactctatacaacaaatgattgcttctcttatgcttctttatgatgatattgcaaaacaacaatatctttctttataactttaattattaacgtgtagttttttgtttatatttttaaaacgtcttcttttttcagaatgcttctattatactagaacctcctgatctatccagctaatagatattaagcctagtaaaaatagtggatagatggcttgctcttttatattgaatcagataactagttgaaactatattaaatactattgtttaatcttatttttttagttgtctttataagagctaatggagaatctataatggaagtggaaaagacgtctttagaaggcgtattactgattaaaccaaaagtatgggaagacagccgaggatactttctagagacatggaataaacaacgctatattgaaattggactacaactaccctttgttcaggacaatcattcttcttcaacgcttcatacacttagaggtcttcactttcaacaacagtatcctcaagggaaacttgtaagtgtctcattaggagaagtttttgacgttgctgtagatcttcgtataaattctcctacctttggatcatggtttggtgtgattctttcagagaagaatcattatcaaatgtggattccaccaggcttagctcatggtttctgtgttctttcagaacgtgcccattttcactataaatgtacggaatactattatccacaagatgaaagctgtatttgctggaatgatccagacattggtattgattggcctgtacagcatccaaatctttcacacaaagataaaatagctcaatcttgggcagattatgttgcttctataacatagtcttcttttgttataaagaatgaatattgtaatggaaggcatggtaataggaccatgtttagaatagaactatatctaatgactaatatctgtatgaaaataaagctagataatcttttttatcagaaagacaatgagtagagttgatatgtctaagtagaacctttttatcaggtggaatttatggtaaatattttttattacctctggcatcaacgtagaaatgtcttaagacttgttataggagattttacacaaaattatctttcctcttaccttggctttatttgggcatttttaggaccattggtaacactttctgttttagctattgtatttcaagtaggctttagagttcctcctattgatgtaagtggtgtcccttttgttgtatggctagcctgtgggatggtcccttggctttatattgctgatggactaacagttggtgctagttctgttacctcttattccttccttgtgcggaaagttggcagatttcgtctggctattcttcctattattcgtttagctgcttctggtatcatccactgtgtgcttgttctttttttacttatccttttattttattataatataagcccatctctttattggttgcaattccctgtatatcttttttttctctatctattgcttttaggtgtagcactatttacttctgctatttctgtttttattccagatattctcaatttgctaagtattattatcaaccttggattttggggaacacctattctgtggcatgcttctatgttgccctcttcttggcattggatctttcttgttaatcctgcttactatatagttcaaggttatagagatacgtttcttgaacaacaatggatttgggaacgtccactagaagagcatatattttttgggctttggttagctatactctttcttattggtatatatacatttaaaagacttcgcccacactttgcagacgtcctttaacgtatttgaagagagatttatttgtcttcttttaaagtaacgatgtccctatcatgaaagatggatagtttcttataagaaataatagatgacaacaaagaatatcttctatatggtgaacaaactaacatgtatacgaaaggacagtagcctatctctttgacattatttgagtatattcattattcatgactcaatacgtatctattatcactacaagctataactatgcagcgtatctagctgacactattgaatctgttattgctcaaacctatccatattgggaactcattattgtagacgacggctctacggatacgtctcttgagattataaaacaatatactgaaaaagactcacgaattcatcttatacaacatccagatggtaagaattatggactgccaacaacggtctatcttggtatccttcatgcacaatatgactatatagcttttcttgaatctgatgatatgtggacaccagatagtcttcaagagcgattagttgtaatgaataaaacacaagcagatgttgtttttaaccagtgtaaacccattggcgatgtgacatctgtatctagagatgttcatggatatttatcacttattcatgaaacaatgtctcaacttaccccacctttttctttatttacatgttatctaaccacaactaatttaattcctaccttctcttgtgttcttctaaaaaaagcacctctacttcaatgtacttttacaccaccacgaccatcttggttagattattggctctggtctcaactttctattggttcaacctttgcttattctcctaaaccccttaccctttggcgtattcatccatcaagttataatacacaaaatgatcagctttttaaaaaatgttggatgccattctatctatctgtgtgttggaatatgacaaaacaagcgtttaaacaatatccatatcagatccataggtatataataccttttctatatatggtaaaaacctggtctgtacattctccatttatttcttggttaaagccaatactccaacgttttagaaaacgttatagtatgtagtaaggtatggttatatgctttaaactacaacttttctttatgaaaattatctattactaaataattttaattgttttgtagttagaataaaatttttttattggaaaaaacatatatgaagtatatacgtcttataaaaaaattttttattatatataaaaaatatgggttccaagcagcagctataaaaactagacaatattttcgtaaatttctaccaagttatgctgtttcttatttcttacctacgattccttatgaacctccatatcctatagatccaaaagttactacagatatcaagcttattgcttactatttaccccaatttcatcaatttcctgaaaatgatgaatggtggggaaaaggatttacagaatggacaaatgtctgtcgttcaaaacctatgtttgaagggcatattcaacctaattatcctcatcctgacataggtttctatgacctttcaaatatagaagtgctacgtaaacaagtagcaatggcaaaacaacatggtatttacggattttgttttcatcattactggtttgctggtaagcgattaatggaaaagcctgtagatatgctccttaagcattcagaattggatatccccttttgtctgaattgggctaatgaaaattggacaagacgttgggatggtgaagatcaaaaagtattaattgctcaaacacattcaccagaagatgatattgcgttcatgaaagatttgttaagatattttaaagatcctcgatatatccgtattaacaatcgacctgtattacaactatatcatgcatcattgcttccagatcttaaggcaactgtaaaacgttgggaagctgtatgtaaagagcatggcgaagaaaagccctatcttatgcttgtacaaagctttcgaaacatagacccacaagactatgactttgatgctgctgtgcaatttcctccccatttaccatcttggaattttcctattgatattgggttaaagggtcttcataaacgttttaaaggaagaatacgacactatagtatgtttgctgaggctgttgtaaaagattatactacaaaatatacattgtatccttgtgtttttcctgggtgggataatacacctcggcgtctttatttttcaagtatttttgcatgctcaacacctcaagcataccgtcaatggttaactgatgcatgtacatttgcttccacaacacatgaaaaagacaatcgttttgtatttattaatgcttggaatgaatgggcagaaggagcacatcttgaaccaaacaaagcttatgggtatgcatatcttaatgcaacgtcacgtgttgtggaaaattttgcagtacctccttctacagcagaaaacaatcctcataaagtattagtagtaggacatgatgcatttcttgctggtgcacaacgattattacttgaaacattacagtggattaaaagaaatacaaatatagattgtaggcttcttttacttggtgatggtgttttattagatgaatatatgcagtctgtacctgtgatgctatgttcagcagatacattgcagttatcaaagctagaagatttttgtggagggattccagattgtattttaggtaatacagctgtttcagctcaagtatataacatgctttcttcatggaatgttcctattgtttcatttgttcatgaacttgaagcagctcttcaacgttttgcaggtgagcaaaatattgcttctatgttgaaatattcaagttattttattacagcatctgaaccagtacgacaaaatcttatttctactcatggagtgaatccacaagattgtataacaatacctgcgtttcttgagccacgtctctatccactatctcaaaaaaagaagaaacaattacgtgagtcattgaatcttccacaaaatggttgtctttttatgggatgtggaaccagagattggagaaaaggttttgatctctttattgaagtagctataactacattaaaaaatacatctcatgagcttcctattttttgttgggtaggaaaacaagaagtaccacttctccactcttctcctttatacaaacagttaaaaaaagatatccataataatcttatttttatagatgaagttgaaaatccaggaccatactttcaagcttctgatgtatttttactgccttctcgtgaagatccctttccacttgtagcacttatggctgcattatgtcagaatcctattatttgttttgctgatgcaggaggaattccttcatttgtttcaaataactctgggattgttgttccttatggggatagtagcgccatgtcaaaggcatgtatccaattgataaaaaataaacaattatgtgaacaacttggaatacctggaagaaaaaaagtattattgcattatacaacagaagttgcagtgccacgtataattactgtgttacaacaggctataaaaatttgtagataatattgttaacttagtgtaattggttctgattaagataggatatttattttatacctatagataattgttgcaaaatcaggattaagttaattaaagtggttaaggaaagtagacgctataaaatctgttttcagatgaaaattataagctagcgttttgtttttttcagaaaattagaaatagagaaaattagatagaaatctaggtattgaacaaccaataataagggttgttttttatttggaatagaaagttatgtatgtctagtaatacatcaaaaaaatggcctaaagtaattccacctcttacacctgaacaagaagctattagccttgatttttaccattattggttagagttacttgcttcaaaatacaatatgctagaaaaatttaatcatggttatgtagttaaagctgcaacccctggtttttgtcatactcttgaaattggggctggtattggggaacatttgtattatgaaaatctttctgaggaacaaacaaaaaattatgttgcagtagatgtacgtgaaagttttattgaaaagattcgtaatattcatccacagataaaagttttatgtggagactgccaagataggttgccttttgaagatggacattttgatcgaattattgctattcatgttcttgaacatttacctaatctccctgcagctatccgtgaaatacatagactttgtaataaacaatctggctctttttctatagtgataccatgtgagggaagtttagcatattcttttgcaagaatgatttccacaaagcgtatttttaaaaaaagatataatcagtcatatgattggtttattaaacgtgaacatataaatacaccaagtgaaatttttgaagaaattgctccttattttaaaaaagagtcaacaaactatttcccattatttgtaccattagctttttgtaatcttataattggagctacgttttctccaattattcataacaattagttattgctatttattatatagtcaccctactactatgtagttctttaggtatgctataagtataacaactttttatgaaaaaagaagtgtattgtactaatcagccataagtacatcgacatgatgtatagtaataggtacttctgtattaacactaatagacagtgtttttttatgtatccatgcataaagtgtacttattcgtacaagatattcaacaggtttattgcttacctttaggttaaacgaaaactgtcctacattatcattagtatcttttatataaagggttatagttcctcctactggagaagtaatggagaaatctaaatattgtgctatagaatcacttgtatattttggtaatgggacatcatatgtaatatttttttgtaatgtaatatttcttgctaatgttatgagtctttgatttgttattgcatgttttttattatattgagcccacaaatagggtatttgtcttgtttcgaatatttgagaaacagtaagtggtatatttggacgatctaacatagcaattttcattgagtgaacttccatatgtgtattatcaggacaatcaagacgaagatctgttaaagtttgtgcatcatgaggaataggtaacattgcttggaaagtcattggtttttcaaaagcaggaattcggaatgttacagaattattctcgttatatcctttgtcatcaaagttaaaaaagagttgaaacgtacccatatgagaatttgttatatcaatagagaataaacaccacttatttaaacaaacagaaataggctgtatttttgctgctgacataagattatatacaaatggatcatatggaccaccaactatttttaatacattatctctaactgttatagatgcgttttgtgtaatatagtcatgaacattaacaataggtatatgtagataatcgactgtatcacaaacaggtaacattgttgaaaggcaactatcttttgcagcccataattcaaatccacctatatttacactaggttcatagttttggtatgtaaattctgtaacacgatacagttgtgagtttagtgggagatagtctatacgactatctgatgcaggaccttccataataactaaaggaagttctccttttttaaataattgatctaattgttttacaaggcttttttgccctttatcagagttatataaggatagaatagataagtataaaggattcctttttcctgaagcagcataaaggccatggccattcagaaaatctaagaatgtttcattcccactaagctccgaatataatatatttatcaatggtttgaatgtatcagtataagtaagtcgttcaggtacaggttttttccaattcattgtaggaaggcctaaatgatttggtatagctgtggtacgttctccttgaaagatgttaagtataatcccaagaaaaagaatccatgcaggtagataaaagcgtattttccaaggagctaaaaaaggaacaagcccaaggataagaaaactatatagtggcatatagcctgcggctaatgtatgtcttcctaaagatcgtgtaagtaagaaaagcatagaaacagaaatgccaagaatgatccattgcttaggcttgatatgttgatgtgaaagaatcctccatgaaaagaggatacaaataccaataagaagtaaaggtcgtgcaacataataccatatagtcaatggagtaatagagtcaacaaatgctatccttccttgattcataaattcacataaagcaaatcctcgtatccattcaatattatcaaaaacatttcctccatggaggcttactaatacagcatagataatacttaatgtaccaaagataagaagaaatgaaggtaaaacaatacgtataatgtgttgaggtctacgaagagaagctataataagtacaatccatgttccaaggattgtagctttacctattgagggcatccaaaaaaatgtgaatgcagtaatggcccataaggttacaatacgtttaaaagtgaagttttttataacccaaggtagaaagagtgcaggtaataaacccatagcatagtataatgaatcataagtggtaaataggctaaatgggtataataataagactaaaagtaatgcataccctggacggacaaatcttgtaaaaacagcatatattataaggttagcaatgactttattaggcattacattccagataaagctacttgttgcctgctcttgtcctccaaaaagcataaatagtgttgggaagaagtaatcccaaagtcctcttgtaggccagatatcaataaaaggaatttgtccaaaagctataagaccatgagcaggtgtaatactattagcaggatgtagtaagtctcttgatgtccactgaaaatgccaaaagagcatggctgtcagagtagtaagacatatagggaaataccaatatttcataagagtattttgtctaatcaacttcttgtgaatagtggtatgttgataaatacaataacacagtagaagaagaggaactaaaagatagagaaatagtatttttgaacaaacctgccaatcattaaggagcattaaatattgtgcttctcctgtaataataatggctataggaagtattagtaatggcgcaccacacttaagaaaaagatgttttttgtctaagatagatataagccatcctagaataaaaaaaggtgttgtatgaagtggccagtgaatatatacaggtgtattaattttatgatgtgataataagaggaattgtatagttagatagacacttagtgatagaaaataaaatccaaacgcagagggtttaagtgttagcaaggtagaaagttttttttgatgtgttaatacaaaaaaccatcgtatgagtaggatcccacagatagataatgtgagttctacaaatgtataaaattgtagccgataggatggatacatcaaaaaaaggatttctgtaacacacatcattgaggctatgccaattagagcagccttttcaaaggtaatgacatcatgagtgaatcgtttagaaaaggtagagaaaatattagaaagtactgaaacaataccagaaaatgagagtgtaaagataagtaataaaataaaatatagtgattgtcttttgcaggtatctataccttcagaaatagccaagccataaatacgtcctacaaaagaactgagttcaaaagactgtactttaaatactctaaggataatatataaacttaatgtaactgcagtaaggtaaagacaaaaaagatcatttctattattaggtaatggaaagagtttcactatttttttatagtatgctgtcatggtctttatcctaaataaaacatgttttttgtgaaagatatgtttcaagcgctgctagtccatgaggagaacctatttcataaaagcgttgtgtaacttcatatccaacaatagctcgattctttacaagaaatgtatatacatcagagagatcaaatgtagtattcttccaatcagtaaagatttttttgtggagacatgataatccatagtctatatactgcattttgtctgttttatgtgttttattatagtctatgatacaaccattttcatattgaatattacttgtatcaaactgattgttatttttataaatggtgagtaaggctggttgagagcttttttggtatgcatcagctattactttgtagtctatatcaagataactatctccatataggaccataaactgttcactgagtaaaggtaatgcattataaatagctccccctgtacctaataggtgaggcccatccatagaccattggatattgagtccatatttattttttttttcaacatattctataacttgttcccctaagtgtcctaggcacaagacgatatcttggatacccttctcagcaagtaaacatagttggtgttcaataaatggctgaccatgtatagataaaagtgctttgggtaatgtttttgtgtgtggatgcatacgagtagcaagtccaccagcaagaatgactacaggtaacattaggataataccacctttgttccttcataatcaaattgaaaacggactctagataatcctgcttgactcatagctttgcataatcgtactttatcctcggcaacaaatagaagaaatcctccacctccagccccaacaagtttgccacctatagctccattattcatgcctaatagataccattcatctatttgagagtttgacataccacctgaacgttgctttttatgttgccaatgttcattcataattgttccaaaaccattgatatctcctgcttcaaggcaagctttgctacgatagccaagatctttaacatagtgaagattatctatcatttctttatcgcccttttgagagcgaacatgttgatctgctaaaatgttacttgcacttctagaaaaacctgtaaaaaagagaagtaaacgttcttcaagttcaaattgtgcttcaataggtatttgtagaggatatgcactaacagtgtcatctttatggaaagtgaaacacgttaacccaccaaaggcagcaatatattgatcttgttttccaattggttctccaagacgatcaatttctatatggcaggcaagttcagctaaatcgtgtggtaaaaggagttttcttctatgcatataaatagctttaagtaatgctgtagtaaagcttccagaagaaccaagtcctgttcctgcggggatgtcagctaatgttgtgatttctatttgtggagttttgagttcctgcataagaaggacttcgcgaataattcggtgattaatttcttctgctttagagcaatgttcaatatctgaatacttgagagagattccttctataaacggatacataatggttacataaacatatttattgatagctccagctataagaaatccttcatgttcacgatagtaagaaggaagatctgttcctcctcctccaagacttattcttaatggactacgtgcaataatcatagattatgtattctcctaaaggctggttatatctagtagatagattatattatgtcaatcattctgatgagataagaatcatttactattatggtatatactcatgagtagttaatacaaaagagatataaaaatgtaatatacaatcattattactatactaatagtagtatattatatataaaaagaatgaaaatgtaataatataacaaatagttattatactatttgttatattataatagtagaaatggtaaatttttagtatgctacaatgtatatttaaattatattacaattatgtaatagttataaaaatgtatatccagattgtttatacagtttttcaacaacttcatgtacagcaatagcttcaggtataccggctgctggcgttcgattatgttgaatatcttcataaaactcttggagttctgtagcccatgatttatctaacataggatattcccatgttgttgtttctggagggcccatttcagggagcatttggtaaagagtaactttttctactccatagctacctcctaatccagagatatctatttttgcttgacggccatagatttcaaacgagaaaagatttttccattcagaacaactaacatgtaaaaatgctgttttttttgtatttgtttgtagtaacataaaggcattgtcatctacaggcatgtcccaatagcatgtttggacagaaccagagattgaagtaaagtctcctaaaaaccaccgagcaagatcaataagatgtggaccttgatcaagaagctctcctcctccagagcgatgtggatctgctcgccattctttttcatagccaattcttccgccatgtccataccgagcacggataaacattaattctcctgtataaccagcttgaacaagttcatgtgctttaagtacagctttatgatatctatgattaaaccctactcgtacaagctttccgctagctttggcggcttgttgaatactcaatagttcttggagattacgaccagcaggtttttctacaaggacatgtttacctgcttgtaatgcttctactgtaagatttgatagactatcatgaagtgttgatatgataatgatatctatagaagggttagcaatgacctcttgccaagagacgtaagcatggcaatgaggatacatagatgcaagtttttcagcacgttcaaaatagagatctgaacaagcaataagttggtgagtatccccaatggattgcgctcgtttatgcccaataaggccacatccaataatacctatcttcatttgtctccccaagttatactacgttctctaccagtgattcgtcgtaatgtataaagatcgctttgttgaagttcttctatatggtctggccatgcataatagttatcccatacagcacttattaaacgtcctgtaatgccattagaagctttagaagctaaaaatatacaaagttctgtagcaaaatcaaatgatgttgttttatttgtttcttttgctttgagcatttgttgataaaattgttcgcctgcacgttcaggtccattagcaagaacttcatctaatagtcgagtatttagcaatcctggtgctacacagttaacggtgatattatcggctatacactcttgagcaattgattccattgtacgtacaacagcacttttgcttgctgcataggcttcaattcgtggcataggatttgtcgctccccctccagatatttggataattttaccatatttgtgctgacgaaagtgaggtaacaacatacgacaaggtaatacagaaccataaagattaatttctatagtttttttccattgttcccaatcaacagtatcaattggacccataggaccataaataccagcattattcactaaaatatggacttgcttaaattttttaatagcttgttgtataagtgattcaacttctgcaggaatagagacatctattgcaaggcttattatttgttgtttatcagagattctaagtgttttaagttcatcgacagctactacaagttgttgtttgttgcgggcacaaatacatatattggctccttcttgtacaaaagcttttgcaatagctaagcctaatccttgattaccacctgtaataatagcagactgttctgtaagttttccttccataggggtaccttttttatatagatataataatagttcgtgttgttataaatagtcttgtatgtaaagccaattgtcgttcaattgttaccataacactatcatatgttacctggtaacccttgaacagtttacatcaagaagatagccctatggcaacatagcggatagatgtatcctttttaagaatggggtgtaaaaatcttgtaggatcaataactaacggtgtcttcatagaggaaaagaaaccaggagttacctgttctttataaaaatcccaacaagtacatacaactaaagcatctgtattctcaataacttcctgtggtgaaggtttgagagatatatggcgattatatatatatatgtctggcaatacacttacagcaggatcatgcgcagacacttttgctcctgcttgaataaggtgtgtcgcatactcaagagctattgagcgtcggagtgtatctgtgccaggtttgtatgttaaaccccataatgcaatatgtttatctttaactctcccaagtagttcgtttagtttatgaataacccacagtttgtgatgattattagacttttggacaccagtaagtacagaagaaacctcttcttgttttttatttttataaattgaagataaaaattgaagatctctggctaatgttccaccagagaacgccattccaggacctaaataagctttttcgccgatacgaatatctgtttttaaaccacgttcaacttcttttgcatcagcgccagtgtgttcacataacacagcaagctcatttgcaaatgcaatggaggttgctaaaaaagtattgatagcatgttttgtcatttctgcagattctactcccatccactctattcgagatgtgatgggttcccaaagagtagaaaggattgtttgtactttaggtgagcgtacaccacatatcactcgatcaggattagcaaaaagttttactgcttgtcctagacggagattttcaggagaacatgcaaaatgtagatcttgtcgttgaaggtcatttgctgtttgctcaagttgtttaatgctgcctactggaagttgtgatgagattaaaacaacagcatcttgcttacaaactggcagaagtttggtgatatgtgtagtaacaaatgtacagtcagcattatcatctgcatcaacaggcgtatcaaatgttatccatacaacatcagcattttgaacagcttcttcatatgttgatttgaaacaaagttttccggtagatatcccttgcttgatctgttcttctaagccttcttctaaaataggaggaataccttgagatagttgttcaagtgttttttcatcaggatcccatgcagttactgtatgacctactgctgcacaaccagacgcataaacacatccaagatgccataagcctattattgctatattcattatgtttccctgagtttatttctggtggatactaagtgcatacttcttaagtattgaataatacatatttttattcaactattcaatatagaatagatgtttatgtttttaattcttgttctgctgtaaggacaatttgtttaacttgtttgttgatactcataattataaccataccagctacagggacaaaaaacataaaaaagtgacaaacaagcccaatggctaaagcctcagaatgaggaacaccaaaaagaccaagagcaaatactgcacttgcttcaaatacgccaagagagcctggagatgaaggaataatagctccaaagcataagataaaagaagcacacatagtattaatgatagtgagatctaactttgcaactattgtaaaagcaaagtagtaatatccaatgcttattacccatacaaggatagttgttataaataaacgtatcatccaatgaagtaagaggttactatgtaatgcactgcaaagatgattagcaatattacgaggatattcccatggaatatatctcaacataaagaaaatccatgaagatttataagataaaagtagtatgcctaaccagataaaagcaattgcactacatgtaagtaaaattgtccatttagatggttcaaagatagagagcatgaataaactgaggatggctaacagattaatatctgcaaaacgttccataaaaataacagggaaaacttctgtgcttggtttacctgttactcgtgcgatataaaaagcatggataaattcgccagctttagctggaaaaatattatttccaccaagaccaaaaaaggctgactggatagattgagaaagagagagttgtttgttaaataaaaaatatttccgaagtccattaacaatacaaataatgattgaaaaaagaaataataaaacaatagacgtcattgaatattgctttattgctgtccacatctgtccaatgtttacattataaatcgcataaataaagcaaagaatgcttataagccaaacagtaactttagctaaaaacgaatattgtctcttagatagagaaatttgctgcatgtgcgtctttataaaacatttcaacggtttcaagagaatattgttctaagtctttatttgctaaagatagcttatcaattaactcaggagtagctgtaataatatggcaaccaatttcggcagcttgatagatatttaagacttctcgaggacttgcccataaaagctttgcttcaggaagatctttaagaatttttaaactagcctccatgtaaggaataggattacggccagtatcagcaatacgtccagcaaaaacagaaacaatagctggaacatctggtgtaaggacatctgcaactgcttgtacctgtttaaggttcattacagctgttatgtttacaatgataccttcactagataatttttgaataagaggacaacaactttccccttttgtatttgttattggaatcttaacatttgcatttttaccccatccagcaataatacgtgcttcacgctccatagattcaaggtcatcagaaaaaacctcaaaggaaattggtaatccttgaacaacagtaagtgcttttttggcaaaggaaacatagtcagttacgccagctttacgcattagagttgggtttgtggtgaaacctttgataagagggttattctctaaggcatccctcattttgtctatatttgctccatccataaagagttttacttgtaaatccattgcttgaggcatgcttatatctccaacatgtgactaaataatcaataaagttaaattgttatgtaagaatttatttttgttactagtaatttttagttataatacagaaaattccatttggttgagtatatacgttacagcatctttcactacagaaactacatggttagggttgagcgatttatcttttttgtcaagagatgaatctgctataagaattgtttttagtcctgcatgttgtccacaaaggatatctgtatctcgatcacctattatccatgattgtgataaatcaatagaatatgttgctgctgctaaatgtaaaaaatatgtaccaggttttctttctaaagacgggcctgaaaagccaggggtaataccttttggatgggtatatgaataaaaactttccataaaggtaatcccatgttctaacagatagttattaaaggtattttttacagctagtaagttttcaagagatgtttttccttttgcatatgctccttgatttgaaataagaaaaaaaggaatatttgcttcttttaaaagggataatgcttcaatcactccaggaagaatggtaatatcttctacatgcattggtgcttcccattcatcccattgaggataatacacatttgctgtgagtaccccatcacgatcaaaaaatacagcaggttttacttgacggattcccacttcatttcctgtgctttaagtaatggatgtcctacaagtaagtgccaaacaactgcttgaaaggcttctgtatgttgagttacttcattttctcctactatgggtatgatgacgcaagcatcagcaaccatagctgtataccctccgtctctaccaactatgccaaaaatagaagctccaacttctttagcaagttctagtgcagctacgatatttgcactaatatttttttctttattcccgccaccaacagaaaagacaaaaagagcatctccactacgtagacgtgaacctcttaaccaagatgcaaatgaagaagaccatccatcatcattgattcttgctgttaattctgaaatgttgtctgtaggagcatatgcttcaaatccacagattttacgaaagtcatttactgcgtggcttgcatggccagcgcctcctccaacacctataaaaaataaacgtcctccaccatcacggatttggcgtaattttgttgcaatatcttcaatgtgagctggatctaattgggaggcgatatctatagtttgttgaagataagttgaactatatgttttcattatataatatcctaacagtcttaatttctcatataattataaagaagatataaacaatatttaactaaactattaactaatagttagttatagctagctgtagctactataaagtgtagggattgtctagaatagcttatatggtaatgcagtagcctaatcagatgatacacatatactgtattactattaatcaccttcaaggatgtttatatattctatatgaatatcttcttgagaatgtgatgtaaaagaaaagtcttttttgtttttccatgcatattggttactaactcgtataaggtaatcttcaggttctgtattttttttaagtgtaaagaaaaatattcctgaatgattgtttttatcttttatggttccttttatctgacctccagaaggagaagtaatacggaacgatagatattctgcatgctgatcagttttatattgaggaattgaaacatagtgtgtttcgtttggtttaagtgttacattatttaataatgttactaatgatttgttataagcagcatgatagggatcataatttgcccataagtgagctccacattttacgttatgagtttggcttacacataatggttgaataagatactctttgaataattgaagcttaaaggaagaaagatttataaatgtatagtctggaaatataagctgaatatcagttaatttttttacattattaggtagcacatgatctaatgtaactgtcgttttttcagtatatgttggtattaacatcttacaagaatatctttctgtgtatggttggttatcaaaagagaaaaagatttgcagccaccctgggacaacattagttaattctagttcaaaagtacaaactttataggaagatatatctataggatccatatttgttgctgtcatcatatttatgacagatggactaaccattggaagatatggaccataattaatactaagaatattgtctgtaactgttatattagagtttttcccatagtatgttcctttagcattaatgggaatcattacttcagcaggtgactgtaatattgggagagcctctttttcaaaacgacttccctttgcagcccatatttcaaatccaaggatatttctatagggaacataatgtttataaataaactctgctatacgatagtgattagctgttgaaggcatgccatctatacatcctccccaaaatggagaagcaacaatagctagtggaattttaccttcattaaattgttgttctaaattttttacaagtactttttgtgcgttatctgtggcgtataatgagatatttggtagataaaaaggattttttttatgtgtataggtataaagtccatgaccattaagaagttctataaaagtttctttctctttaagtttttgctgtaagaattgtatcacaggtttatagttatcagtataagtaactcgttctaatgtctctttattccatgatacaaggggaatttttaatgcttcaggagagataaatacaaaattattataagtaagtaagatgataatagcaggaataaatagccaggctggtaaatagattcgttgcttaaatggacgaataagaggaagaaggcctattaaaatgaatgtaaataccattaagtaagcattttctaataaacaatgtctaccaatggatcgtgtaaaaagaaaaagcatactggttgccattcctaaatacatccagtggattgaagaaatggattgtaatgatagactacgccatataaacaaccagcagatgctagcaaaaaataatggtgtaacaatataataccagacaacagttagtgagggttttgtaatagcctcataagcatgggctccatattctaaacaggtaactccatgtatttctgtaattctatcaagaacgtttccgtctttaagtaaaagaaagcttatgtaaatgactcctaacattccaaaaacagtaaaaaatgctggaattactttacgaaatataacttttatgtcctgtaatcctttgatgaaaaaaacaagccataaacctaaaattgtagatttaccagcagatggcatccatataaaaactgtagcagctaagagccaaatacaagctgatcgtataaaagttatattacgcattgcccatggtaaaaatatcaatggcaataacattaaactattataccagccagagtattcaactaatacttgagcaaaaaagaaggtaagaaaaaaagcataggcaggacgaacaatttttgtaaatgtacaataaagaatgatgagatatgtaaggtatgagaatacctggaaccaaataaaactatctactgtatgctgttcgccagctaacagcatgaagagtgtacatggtagactatcacgaagtcctcttgtaatccatgtatctacaaatggtattttgccaaactgaataagttgttgtgctggctcaaatgaattagctggatgaagcaagtcatcgtctatatttagtgatggttgccacaacataaaaactgttagcgtaataatacataaggggaaataccaatacttcatcaccttattatagctaatagatatatgtttctttgttgttaaaaaaagaaaaacagtaatagcgcataggacaattgtaaaataaaaaagaattgattgtagtgagacttcataaccatgagtcagaagtatatattgtgtttcactagcaataataaaagttaaggggaggagaagaagtggtgtacagcttttaagaaaacgatgttttttgtccagaatagatacaatccatcctaatagaaagaaatataagatattatgaagataccccatacgtgtattaagaagtccatctagagggtaccgtaatgctttagaagaaagatatattccagaaaatagaaaaaagaatccaaatgctgctggtgttaatcgtagtttttcagaaattgtatatctttcatttatacataaaagccaacgtaatgttacaataagaaatacgccaagcgttaatgctttaaaaagatcatattgtatttcatagagaggttcatttataagaaccattggtattgatatgattaatatggaagatacagaaataagcgtatgtttttcaaaaaggatgacatcacgtttatataagtcagtaaactgttgtattatgatagacaaaagagaaacaatacaactaaagataataaaaaaaatgcctaataaggtaaaataaagagtaggacgtttaaatgcattatgcccattgaaaatacctcctccatgaatgcgatctggaaaggccataagctcaaaagattgtgatgtatagaataaaaaagtacttagtagagctattgcaatcgctgtgataaagacacaaaaggaatcatttcttttttcagggaaagggaaaaattttgacagtccacttaaataggatgacggcatatcttagatcccatgtttatagtagtatataaatacatatcaggagtatagtaataggatacatagatagttaatgtaaaaaaatatgctatactctctacagtattagagtaccattttaatgtacagtaaaaagtatctttttgaatagctatataatatcaaataatagtttgaagtaaatggcgtatagcaaggtgtttattaacagaaagttacttttctgtctagcatagttatatctttcattaaacaaatgttaatccatatattgatagaagcttttatttagatagagtaaatataatgaaaaatacagctaatctccttttattgcacaaatactttctatatgtataggatatattgaatgtgatgtaagagaaaattgttgtttattcttccatgcatattgactactgatgcgtaacaaatagtcaataggttctgtactctcttttaatgcaaatctaaattctcctgaatgattgtctatatcttgaacattgcctactaaatatccaccgttaggagatagtatacgaaaatgtaaatactctgctatgtcatcttttatataagaaggtatgactatatgataagtttctgatggatgtatttttatatctttagtaaatgttgctaatacagtattgttagataatccatgatatggatcataatttgcccataagtatggtccatagttgtgttgatctatttgtgtaactataagtagagtacatggataggtgtttaatagggtcattgaaaaagaatagatatccatataggtatggtctggtgcagtaatacgaatatctgttattgcttttgctccttctggaagaatttttgttagctgcacttttgtcttttctttataggctggaataaaaatatagcatgaagattcactagtatatggttgatgatcaaatgaaaatgaaagttgtaacgttccttgtaatacatttgtaatctccaactcacatttacatgttttatatggagctatttctattggagacatattggttgcagtcattaagtttataatagaaggtttgaccattggtagatatggtccataatcaatatgtatagtattattatttgttgttacattagcattatgaccaaagtattggccttgtgttacaataggaacatctactgtaacttgttcttctacttctacttgtgaagtctcttgactaaatcggctttctttagcagcccaaacttcaaatccatggatatttttataaggtacataatgttgatatataaattctgctacatggtaatacaacattgttgtattaagtccatcaatgttgcttccccaaaatggactacttacaattgctaatggaaatttacctttatcaaattgttcctgaagttgttgtacaagtattttttgaaccttatcagtaacataaacattaactagtgacaaaaataatggattttctttgttagtgtatgcatacaacccatggccattagtaacatcaacaaacgtttcattgttttttaattgggattgtaagaattccactataggtcgatactctgctatatagtgaacccgttgaagatttttagttttccaatttacaagtggaatttttaatgcttccggaagaagtattacaaagtcaccagagagaagtataacagtaacaataggtatagtaagccatgtagggaaaaatattttttgtttaaaaggacgaatgagtggaagaagtactagtgtaggaaaaaaaatataaaccaacgttgattattaagtaattcgtattgtcctatacatgtattaagcatgctttgaactaaacaatgtctacccatagtacgtgtaacaagaaaaagcatacttgaagctattccaagatacatccagtgaactaaaggaatagttttaaaagagagttttcgccaagcaaaaatataacatatccctgcaaaaaaaagtggcataataacatagtaagaaagcgcttctatagaaatttttggtgcaatagtactaagtgtatgtgctccaaattctaaaaaggtaaatgcttctatttcagaaattctgtcaaaaatgttccaccctcttaagaacactaaaagaaagtagcttactcctagtattccaaatacagcaatgaatgctgggattactttatacagtaaaatttttatattctgtagtcctctaatacaaaagacaagccataatcccaaaatagatgctttcccagcagatggcatccataaaaatacactagcacttaaaaaccatatccatgcaatacgataaaaggttagttgttgcattgcccatggtaaaaaaagaggaggtagtaaaataagagaattataacaagccatattattaaaagtcagttgcgagaaaagtaaagtaagtaaacatgcataaataggacgcacaacttttgtaaatatagcatatagtaagatgatataagttatggaccaaagtatatcaaaccatataagactggatacagcataattttctcctgcaaaaatcataaagcataaagaaggaaaaatatcctttaaacctctatgactccaaacatcaacaaaaggaattttatcaaatttgattacttgttgtgcaatagtgatactatttccaggatgttgtaagtctgaaccaatatcaagagttagtttccatgaaacaaaggtagttaaagtaataaggcagataggaatgtaccaatactttagaagattgttgtaatgtattgagtattgtttataagttaattttcttttcctctgtaagagctgtagtatatatatatattacaaatcctaacaaactacctgtaaacaaaaataataatgtttttagagaccattggtatcctcttagcagacctatatactgagtctcgctggcaataaggatagttaaaggtaaaagaagaagaggtgcaccaatcttaactaattgatgtcttttatcaaaaagagaaatgatccatcctagaataaaggtaatcattatcccatgaggataacctatacgtatatcaataggtgtatctagtggatatttatatacctttaggaaaaggtgtattgctgttaatagaaagaaaaaaccaaatgtaactggtgttagtttacatctaatgacaaaagaagaataacctattgtagataataaccaacgaaacattaaaataaaaagtataccaaagaataatccattaaaaacatgatattgtacttcatagcatggtttatttattaatataaaaaagatagaaaggatctctattaatgataaagcagtgagagcatgtttttcaaaaaggattgtatcactttgatagttctctaaaaaatgttttaccattattgaaagaagtgaaacaacagtagtaaaaatagaaaaaaatattataaggaaagtaaaataaaggaattgacgtataaatacattatgaagttcaaggatagcaatgccttgtacacgatgtgggaagctagttaattcaaaagagagcgataaatagagataaaaaatacttaatgatgctaaagcaatagctgtaataaatacaaaaaaaagatcatttttttatgaggaagaggaaaaatttttaaaaaattacatgtagtagtatttgacatattaaacccattactaattattttttctctactgagtaaactagtattgttccaacacgtatcagaggcataaaaaacaattatttttctttattatcaaaaacccatgtgttttccataagccaactgacagttgtttttacactttcttctatggtatacttaggcgtccaacctagagaacgaattttttctgttgcaagataaataaaaggattatctcctatccaaccacgatcaccctcgccaaattgaacagttggtgttactcctaatgaagagcaaatccatccaatagaatcctttactgtacaataactatcaacacctaggttatagatatgaacctttgtatctgtaggtgctttttctattgctagcaacattgcatcaatacaatcatctacatgaagataggattttcgttgtgtaccatttccaagaacagtaagttttgaaggatcttttcttaattgattacaaaaatcaaaaacatgtccgtgtgtgtagcgaggtccaagaatagaaacaaaacgaaagatatgtccaataaagtcgaaagattcacaataggcctcaatgaatccctctcctgacaacttcgatgctgcatataaagatgtttgtataggaaatggagcatcttctggggtaggtataatagaagcttcaccatatacagaccctgtagaagcaaaggctatccgtttaatattatgtaaacgcatggcttcaagcacattgtgtgtggcaatagcattttgttcaagatctttcgatggatgttctactccaaatcgaacatctgcatttgctgaaagatgtatcacttgctcgcctgttgcaaaagcttttgacaatgctttagtatcaagaagatctccttctattagtgtaaagcgttcatgttgttttgccttattaagaaatgtatgttttcctgtagagaaattatcaattcctgttacctgatgacctatagataaaagtttctctgctagagtactaccaataaatccggctacacctgtaataatgtagtgcattttctctccataaaccaagataatatgagttattcacaataaatatcataacttacaaaaacgatatttaaaacaagcaataatccataacaagggatctttaaaaatatgaacttttttcccttcattgagagatcttgaatgataatgaacaggaatctctaatggcctataacccttacggcataatttacctacaatttcccaatcaaaatcaaacctatttgctgtaaaagtcaaaccttgaatgcaagagcgtcgaaacactttatacattgtaaaaggatcttttaatttctgttggtaagtaatgttaaaaagaaatgtaaataatagatgtccaaagttaaaataatattgggaaaatcgttctcttttggcaaatcgacgtattttccaactgcggcgttcttggctgtgtcttgaacccaacacaaaatctgcttttttgtctatcagtagctgtaagagttttggatagtcatcaagatcatactctgtatctgcatcttgaataagaatatagtctcctgttgcaacttgtagtccttttcttacagcatgtcctttgccttttgcttgttcttctaggataacttttacttgaggatgttccttatactgtaggacaacttctcttgttccatctgttgaattgctctcaacaataataagttctttttttaaattaactaaaggaagcttaaggacaccatcaatgacttcttgaatagttgctgcttcttcatacgcaggcataatgatacttagtttttccatggtgttacctattataaaaagaaagatagaatttgtttttatctatatgagttgtttaataacgatactaaaaagataaagcattactatcagaacctatgcttcttatgagagaagttataaagattttctatatagtatattacaaatatgtttgtctataaaaaatatactcctatgctatataatatactttgactagaagtatacttctaattatttctgtgtataaaaagtattgatgtagtatatagaaagtatatatcttttggaaatcatactatatagattcttgttatacctatatagtataacagatatacttttaataatatgtataaattttaaagaataaaatagattaatagataattttaaggtaaaaattatagagtagaatgagtacattcatgtgtatttggtaatagatgattattaccaaaatacactatgaattccccagatgaaatatactatttataaagaatatactatatgaatagattttacttcttcaactgttgttgcttgttgaagctgaagttcaaactcagctctttgagtagaaagaatagttcgtatttcttctattgatttaccactagattctggtgtaggagcaagaataacattcatcaatgtttcattataggctgtatctatatcaagaaatacttgttcttttgcttcctttaatagtatagcaggatctggctcaggacgtgtaagtattgcatttttaggaagaggtcctggctcagtcatataacatggttcaggtttccatgtatcaccaggcaaccagtatggtgtccctgttccttcaataatacgatcacgcccatcctttttctgtctatgatcttctacttgtttccatgtactaccattccattgaggaataaagttagactgtattttaggtttcactttggtacaattatgaggtaatccttgataggcatatgtttcactaacaaaaaagccttgataatcatattgatatacggtttccattagtgtattcctcctacatagacacaaggaagtaaaccaattcgacgtggacgaaattgtgcagcagtaggaactgcgcgtgaagcatctaagttaatttggtgatttgcatagccactaggattaaaagtttgtatgacggtaccatgtccactggcataaaatatcccgccacaatttgaaaaatcgataatattattataaaaccaagctgtaatatttcgcatagcatcattttcccatttcccaatagagtcacctacatttccataaatatgatctgttcttgtatctgggagttttatagtctttgctgcttcgtctaatacaaaaaaaggaacaccaccaataccaccagcagctgttgatagtgctgtccaatctgcttgagatttacatttccaagtatttttttcttttcttaaataattccatagatcaggataagcagtgtcggcatctggaagtatggacccatctcggacagcccaacccttaggtggtgttttttcaaaaaaatctttaaattcgcttaatgttggtatgatagatatcacaccttcatctgttatttgaacaggttcgccgtctggttgaactaaccctggtttcattgatgttgcaatggatagacgctgttcaataagtttatctatggcatcacgtagttgaattgtagattgtttattaggttcaatttcagcatgctcaagaacagcaataagttcttcttgtacgctattgagccaatcagcagaaacagttgttgcttctataggtatagtaggatcgccttctgtgaatcgattatttggtgtagcatctggggtatcaatacgaaacatgtaacctccttatagtgtatgaataagtgatagtgaggggagaattacactcccctctatgattatcctgtcaacgctgttgacaaaggatacacgtatagcaaaggataccggggtcttctgaataaccataacagacaaatcctcagtcgtatgccatttttgtatacgtgttgtaagtatccatgagccatgtatagcaagttagaaggggaatgaaagattgactggggtcagtataaaaaggtaggtacattcacactgtaagaagatagattacatcattaaatagtaattagttaaatagtatttggataaatccatctacctatattgactaacgattagacatagttttgttattcttaacatcagaacaattattgtatacaatagtacaagtataattaagtgtgttaataggtagttaacgtatcattatgaatatactatatggttgtgttagttttctttttattacgtttttatctttaccgtttttgctaacagtttgtggtattcagataagaggaatggataatagagaaaatagagtattagtagaaaaaccagcacttaataaaacgtctttacaaaaatggccatcagtacttgatccttggtttcaagatggtcttgcttttcgtagtcattgtgttggactttatttaacaatatgggaagaatggctttcagctcctgttaaatctgctgccacaggtaagaatggagaattattccctatcctttctacagcacctgtccttcaatactatcttggtctaaagccaattgatcctcatgaatatatacattttcaacttgcccatgcaggtatgtatattttcttaaagtctaaggggataccctatttccttgtaactattccggataaaccaacattatatccagaataccttccattttggacacgttggtgtaaaggagaaagtgtacacaaacaaaaagtaaaagctattcaagaaataggtatcccttggatagatttacttcctattcttcatgaaaaaaaatacgaacatgctctttataataaaaagtttgatcctggccacatgaatggttatggaatggaaatatgccatcagtatcttatagaagcactgggcaaatattttcctgctcttctatcaacggctagtaaaccagcctatagagtatatgaaacgaaaaggtataatacagctttttctagtgaatggctttcaagtatagagttattacaaatagaacgatttcaatcaaaagagatacctaatcttattaaaaaagaacctcaaacctggtttgaacctcagcttattattaataatcgtcctctatcaccattggatatagtattctctggtgattcttattttttatgttcatgtcaatatgctccatctcaccgtatatggccaggagatctccctcttttagcatattattcaaaacaatttttaaagatgaatatccaatatcttacaattccctttctcaaacaactttttgatactgggtataaaccagatgttgttatagaagcccttgcagaaagaaatattggtactccatctcgagcaaggaaagattctctactccgtacctttggagatatttatttaaaaacacccatctattttctaactccagaatatattaagaatataacaaataaagaagattctaatgatattactatatatatatataacaatactatttttcttaaggcatcagcgaatccatacatagagttaccttctttagttacagatgctaatggacgtgctgcagttgttgctaatatattttctcctatccaaacatactttggtgtgtattatacaccaaaagatataggatttgttcaagaatcatctattaactgggtaaaagtagaaccaggagaaaatttagtacatctatatattagtactcatccgtatcaagaaatatctatccgttttcatttaggctttgatcataatgagtatcgtattcttcctataccagatgaaataaaacagatgcaaaaatttgtatctgatagcatttaatttacatctcactgaatatagatacataactaggtctagtatatacttcttcaattatgtagttagttattagtaatattgttatcatagtgttccatcataataacatttatgtaataggaacgtgtctgtattctttaataacaacatattgtgatgaaaacatgctatctttaaaaagtattcatcaataatattaaatggatatacttgacaatgtcttacttttattttctatatatctccttgcataaaattatattattcactgtagttacatgtataaacagcacaatcctcaatataacaacataataagctagttgagctatatataaaatagatgcaagttattcaatcaatctttatttttattttccttcttttttcaacaatgcccttttgcttatctcttcttgatctttctccaaaaactgtaactctcagagaaaatagagtattaacagaaaacccttcacttaaggacacaccctttcaaaaatggccaaaggttcttgatccaaggtttcaagactgtcttgcttttcgaagtcattatgttgctctctatcttaaaatctgggaagaatggctttcagcccctgtgggagaatatgctacaggctatgagaatgatgtattctatgttacttctcttaaaaactatctaggtgtaactccaattactccagagaaatatgcatattttaaacttgctcatgcagggctttatgcttttttcaaaacaaaaaacattccttatgtttttataaccattccagataaaacatcattatatccagaacttctgcctttttgggcacattggtgtaaaggagaaagttggtacgatcagttcacaaaagctattaaggaaattggtattccatggatagacttatttcctatttttaaagaaaagaaagctacatataaagtatacaataaaaattatgatactatgcatatgaatgcatatggcgttgaaacatgttatcaggaaataggaaaaagactacaattccctgagctcatgccaacatcaagaaatgaattttatacagtttcttgggataaaattgttatttctaaatttataaaagaaaatgtaccagtctttcaattattacatacagatcgctttcaacctatagaaattcctggattagtaaattttgaagcaaactattggcacaaaccaagacttaataataataagcccctttcacctcttactgtatggcttgttacagattcttattttttgctatcaggtcatcaagaaagagaatatcctgtatttaggggagatatacctttattagcctatcatacaaaaaatctttttactacacatgttcaatattttctttcacctttctttcaagaactcttaaaaaaaggtccctatcctgatattctgatagaaactcttgttgaaaggaattggactaccatggatagggcaaaggaagatccatttatacgaatagctggagacatttacttacacacaccaggctatttacttaccccaccccttatagacaattatatatatatataacgatataagcatagataagaaaaacaaaaataaaataacattcactacattaagagatccatacatagagttgccatctatcataacagatgctgatggtcgtgctatgattgcagcacatgtgcattcttcaaaaaagacatatataggtcttttttataaacccaaagaatctaatacatttaatcttaaagatgttgtttgggcagaagttcaaccaggggagaatactgtccatcttttttttattacagagccccataaggcaatggatataagagtccactttggatatgctcaaagtgaatatacaattcttcctatgcctgaagacatacaaaggatcaaaaaaatgtcagatgcaaatagataaatagactttttatgaaaaataaaaaaacaatacttttgataacaaaatgttatgtaacattgtattgcttaagctataaaaagaattgtatagggtttcctgttgacaatatctaatgttaaactataaaatcctgttgctatattatacacctataactaaaatttagcctatcctttttcatgaaaattctccaatcgtgtttcactcttttattcctactttttttatctattccatttacactaacaatttgtgattgtgctccagaacctattgataatcaagaaaatcgagtattagcttggcctcctaagttgaaacaaaattcacttcgaaattggcctaaaagacttgacccttggtttaaagattatttagcctttcgaacacactttctttgtctttatcattggatatggggaagattcttaggctctaatctacaagactatgctataacctttaatggtgaattatttcctactttaaatggtgcaacagttttacaaaattatttgggtttatatccatatacaaaagaacaaattacaaattttaagttgttacatgcaggaatatatgctcgttttaagtcagaaggtattccctatattgttgtccctgttcctgacaaaactaatgtatatccagaatatttacccttttgggcttcttgggctaaagggttaagttattatgatgaacttatacaggctattcaagaaatacgtataccatatatagatatgctatctattcttgaatcaagaaagtctgaacatcaactctacaataaaagatttgatactgctcactggaatggctgggcacttgaaattgcatatcaagccatggggaatttccttacaaatattgacacagggtttgagccaaggccatcaggtgaaatttatgaaatttattttggtagaccatatcctcgtctatacactcgagaacgtgtaccattaatgaacgtatactctcataatctccatgtagaacatttacctgaactatctaaagaaaatccttgctgggcagatcctcaacttattgtaaatgacaaagcaaagttaccttataccttatggtttgtttcagattcatactttctatttgcatttgataactaccaaccttggataggtggtatttctccattagcacaccatacaaaaaaattcttaagaatgcatttcaatacatttacccaaccatttattgaaaaatcatttggaacatcatactctccagatattgttattagaacatttgtagaaagacttcctagagatttaatgcaagatattgatccagtattaaaaatttatggagatattcatttaggaacctctggatatattttaacaccaaataatcttcataaggtagtagctgaatcaaattgttgtataactaaagaaatagatcaagaagaacaaggaataatcattattgattcttcttcagacatacctctttttaccttagccccagttatagcaggtaaagatggacgtgttatgtttgcaacatatttgaaatctcctattaaaactacagcacgactatattatacaccaaaaagtataggtaccttaaataaagaggactttgtatctatagagctcgaggaaggggaaaatattatctatatgtcatttgatacagagcctggacaagaaatggttctttattttgaacctggatgtcatccaggagcgtataaagttctccctatgccaaaaggaatccaacatgttcaacatacatattctagagagtcataatggtttttagttctgttacgtttgttttagtttttttaccccttgttcttattagttacttattattatatcttcatctgcatacaccaaaacataccatgctttggtgtaatacgtttttattaatagcaagtattatcttttatgcttggggcgagccaaaatttgtcatctggcttattgtatcaatgatatttaacttccatatggcacttctcattgcacctacaaatagtagatccatgagaatttttggactatctaccgggttaattcttaaccttttgttacttggttactttaaatatttaaccttttttatggaaagtggttttgctctactagaaattttctttgaaccatcaattaattcatcacaactaaaaactattgcacttcctttaggaatcagtttttatacattccaagcaatgagctatcttattgatgtatatagaaatgaagtccctgtatctcgcaatatcattaattttggatgttacctcacaatgtttccacaacttgtagcaggacctattgtacgatacatttctatacaaaaagaacttgaacatagagaactttctccacaacgcatatcaagtggtattggtcgatttattataggtctttctaaaaaacttcttattgcagatactcttggaagagtatcagaacaagcttttgcaattcctacagatcatttatctccacttgctgcatgggctggaattatttgttatactctacagatttattatgattttagcggatactccgatatggctataggattaggacatatttttggttttacttttcctgaaaactttaattatccatacatttcaaaaagtattaaagaattctggcgtcgttggcatataactctttctacatggtttagagattatctttatattcctctaggaggcaatagacatggattaggtcgaactgtcattaatcttcttattgtcttcacattatgtggattatggcatggatctaattgggtctttattgtttgggggttatatcatggttgtttccttgtttttgaacgttttttccctaaattccctagtatattcccaacattcttacaacatgtatatgcagttcttgttgttacattaggatggatttttttcaaagcaacttcacttacacatgctaaagaatatttttatgctctcatttcaggaaatcctccaggaattcaagcaaaccatgtatggttacaactctttagtacagacgtataccttgcacttatcattggtatattaggctctatacccatctttccatttttaaaaaataaatgggaacacttgcttataaaacaaaaaacgtctattgctatttcattagaagggttacgtttttttatgctatttctattattttttctatgtatcatgcctctttttggctctacctataatccatttatttacttcagattttaatataggttgaaacctctgattgttaatgactgtcattggaaggaggactacattaacaatcagaggcacatccttatttatctttattattgaataactcttattcataaaaaaaataaatatgttatgttaatgattaagggatacattaagataacaaataagataaccatactggtaagtttaaacttctcagttaatcacataattactatatgttctatatagcaagctatggtagtcttattaatcaacacattatttttatttataaatgtgattacacaccagttactatttataaacactatttactttttattaggttaatatgtgcaacaatggatagagaattaataaaaaaagtactagggcttattataaagaacttcagagaagaacaagggctaagtcggtatatagtagcaaaagaaagtggtttggattcttcttggttacgaagattagaagatggaaaatctggaattcgaactgaaacactcattttaattgcacgtggattaaaacttcctgcagcaactattattacaaaaatcgaacaagcacttgaaaatccagatgcatggctagctaactatagaacaactagtgacagtatatagctcttctttttcatgttatcgttaccttaaccatgtaactaatcatacataccatttttgtatgatttactattcagcactatatagagaaatgttctccattatcagtttataataaaaaactatcaccacattttatatagtacttttcttataaagacaggataaacagtattctattttactattctgttacctccaggagtcatacatagtttgttcagagtaacttgatgaagaaacaggtataaatccatctttgatagatacagaagaacaagcaatttcccataacatttctaatgcatcaggaccatcatcatgatcagcttttgggaaatggcgaagttgatggataagttcttgttgtgatgggtgcaaaagaatatgtttttgaaccatatgaggttgtaatgattcaatacgtaacaatttatctgaattatgtgtaattgctttaactggtaaagctaatccgcttttctctgcccgttgaacaagaacatgtgcaaaaaactcttgaaactgcacggcttctactccccataaaacaggtttgtattgtctatgtaaagcaataatatcttcaataatcctatctggatgacgtttcctaatagatgcttctatcacatgaagtgtcatagatttttgacaaaatcctccaacaagtaaagcagatggatcccttccagcaccatgtttacctaatgaaggatcacaaactccaaaaaaagtccaactatccgaaggggtcgaccaatagtaaatacactgtgcaaatggtgcatcatcaccacataaaggatcattttggtattcagaatcaaatgcagcatgatcttctgctctacgcttcatgagtaaatacaatggacgcatacttggccaacttactttggaaccctgaagcatttcttcttgatgtacctcccaaaaacgccaggcttctttttctccttgttcagaaagaataacttcccactgatcccataaatccatacggtcaggccattgaagaatggctttaaatacttttttttgccataaagatttcgtcaatgtgcgtgcaaggactgaatcataatgaaggatggtacctatataaaggacatccatagaatcatctgctgagccaagatttaaaactgttttttgaagccaagcttgcaatttatctctctgctcaggctttcttacttgctcatcattctcaagatcatcaagaataaaaatcaggtcgatgtgctccatgcctaagtcctctcatacgctttcctgcacttagggcctgaactttgacattagaacatgtaataattgttccttcattccaaacactgccctctcctgtactttcaggaaaatcttgttgtaatcgaggattagaagtaagttcaacttttatagcttctagtaaagaaacactttgttcaatagtatctgctataagtaagatatagtgttttttataggttattatagcccatataacaaaaaataaagataccattgtagactttgcctcaccacgaggtgctgcaatagctaaccattgtcctttagggttattaagaatacctggtaaggtctcatcaagccaacgatgaaggactgaatcatgatccatgaatagttgtctatgatgatttgtagtagaaccactattaattgaaatagggcatatattatccaatctatgtggaatattatctactgaaacaacagataattgtttatctattacctgtacattctgtttaataatacctaatgactctaagctactatctgaagaaatggtattttggaatatcttgttttgctctactgatgatatgggttgtctattttgagtaggttgtattctgtgtacataatgaggaaagtaggtttttctaaaaaaagaaaaatcatactgaacacgttctatccttttttttgtggcattagtcgttatttcaaactcatgacaggttgtttcaatctgtcgtgcaagggtatttgcaagtgagcctatagcattagaaaatgctttttctgaaagtttcactgaccatactctgtaataagaatattcccaaatggttctaagatttctaaaagatataaagcatgttgaggataacgatgctgtgtgaattgtacaagttttctcatgacatcaagggcagtagcaagtctatctgtttttggtaatgcatgacggcttgcttcaacagtttttgataaactagagctcaattttgctaacatgtgtactttagtagatgtagaaatatccatatcttcttggatctcttccaagatttttttatgctgtaaaacatactcaataaacatttgacgtgtaatattttccataccgcttcctacaagaaaaaaatgttctcgtaggatatcccaatcatcagaaagtttttttgcctctcccttccaacgtgctgctgtggacagagctacattaaatgaagacgcaacttctgcaagagtttttcgggatgtaatatactcattgcgtatggcttcctttgtttcaggagcatatgcagacatatatatccttttccttcttaagattgattattattaagtgatgctttttcaagaattttatataaaagaggtggtacaggagcatgagatacctgtccccattttttatgtattatggattcacaaatttcttctattcgttctttaaattcttccttaggaatatactccttaggaagacgttctcgtatatcaataagacctgtaagaattaaagtaatacggttttcaagtcgtatagcccagtaggataataaagcacagataactccaagcagtccaataatattattatcaatagtaaaaagtgtcactgttgtgcctccagaagttctccaatagcatgtagttgtgtttcaattctacgacaatatagtccataatcctgtatgtgtgataataaatcttttggtgtgactatagactcattagtttgtgaagaagatgctggtaaagtattattagacgattgttttataaacgactctttttctaatacattggactggttattctgcttgctagtatgttgttgtataagtgaagacgaatatgctaattggttttgctgtatcctggcattagtggttccggcggttccggtatctgaagcagaacccctggtatgagcgtttttacctctggtgttattactggaactggtgagcccaaggacctggttgtaggtagacacccactcagaaggtaaaccaagacagtaagaatcagcccttttagatacctcattaatctttcctttaaactcattacgttctttggtgagagttttacgtacttctcctaattctttcataagagaacgtatatgttctgtttgctgttgaagacgtatacgtgcttgttgttctgcttctgcaatagcttgataacgagcttgatcatttttagcatattcagattccaacttagcaacaattgctttatatttattagttgttattgactttccccgttcgtatccagaaatgaatagacctattaggccaataatcacaaaaagatatttaccgataatcacactcaacccctctaccccatcctgcatcttcatactttttttgataggtatgcagaataacttttggatacttcctattttcttgaaaggctgattttctacgacctgcatttatgcgttcaacacaatcccaataacgatttggatcaagtccattatcttttgccatacgtttatctttttgaacccatccaagtccgccattgtatgctgagagcataaacgccatttggtcacattgataaatggcatctactcgctcccaaagccatagatcatatgtaaccaatgcacgtaaactccatgcaggattaaaaggtagaggctcacctgtttctggagcaacagttggcaaccaagcagctgtttctggcataaactgagctaatccctgtgcaccaacaggacttactgcattttcatgccataaggattcagtgtgaatctgagctgcaaagagcgcaacaggtgcatccattccccaaacttcacgagctaccctaataagcacatttcgatgacgctgtgctgcataaggaatttctccaagacactctttggagccacataacaataatagaataatacaacatacttttaacattgttataacctacttatagcttgatactataccaaatataacaaataaaaagattgaagactgtcagccaaataaagtgttggtactaacaatggttacaacaatcactttttataatcagacaatatacagtttcattagattgacatcttcttaaacatctaattcttaattatctatatttaaaggcaaattatccttttatgaccttctaatgccttatgaggggatgtcatctaatatagataatatagatcttaattataatatgcagaaagtataaagtcctaatatgtaggagttacaaagagctatcctaatatatcaataattatgataggttgtcggtttattgacgattttgggacacaaaatatttttcaataatctagataaattttttaatatagtagtcttaatataacacctgattattttatgatctttcacatatggaacaccccttgcacatcaattattatatgtgaaaagaggagtgtctagttgcaatgatctcaataaattatgcatcccttttgtgctaattaatagttagccatacattgagctatttatgtttttataaatatgtaaagatagttacgaaaagtactttcatttccccttatatggtggagtacttttttcgtgcttattctggcataggagaaggtatgacagactgtacatacattataaatgaattatatctaaatgtaacttttaaatttttaataaaaaaaacaatatggagtgtgaaatgtagataatataattactaatttagtatataactatgtagattaaaaaaattttattaatttataaaattaaaaatagatattttgttaaaattaaaaagaatattttttatttttaacaatattttttaattagttaaaaattattttttataaaaaaggtaatttttatgaaaataaaaaataaaattatttttatttctatagttattattagtatgtcaattatgttacttatattgagtaaatacagcattactaaattatatagtatagatagctatataacaaaaaatgaatatactaagttatattattttttagataaaaaatttttttatgatgcagaatatgtaaaaaaacaggctaacgataataagctattaaaaaaaatgtataaaggtggagatgataggtctatactctctaaaaaatatattgcattacttgagacacatgaatcaaccttcgagcaagatataaactcacaggttaattcagtatacatgtgcccactgaagaaaaatttaaatgaaacaccttgtagtttacccacagcagaaataggcaacaaaaaaaacgattctgaagagaatcatcctacagtagaacaaatagatgatatattacaagaaacagaaatagaacaaacaaatgatacattatccaaggcatcacctgctacaaatccaaaatttgctacacaaaaacaacaagtagtaagcatattaccttcaaaacatatctcactattaaaaaaaattataaaaccatcacagcattcatctaaaaatcgtccttcttctgttgcaaaggctataataggtatccctggcctacctttatatgcagtaaatctatatgggcaaagaggagatgcaccatcaggaggtgataaaaaaccatctggaactgaaggaaacaatagttcctctgatgatgaagaaaaagaagaaaaaaatcattctcattatgactctgagataaatgaacaggataaacatacagataaaggggaaaaatcagatttagttggagctgtgggaggtacatctgataattttacaaatctagatggtaataaaagtgatggctctaatggctttgaagttcttgatctcccttctcataaccattctgaaccatggcaaaaacttattgttgttgacgatgaatcatcacatgaatcacatactgaaaacagtacacaaaaaaatgaaagtgataacaatgcggaacctaagccacttaaagatctgtatgaacttggagagcactatccccctatgtttaaccaaccaaaacaagatatgagtatggggattataggacctggagatgaccttatacgtccattaataaatttttgtgagccacagtttcaacattataagtatatacatcatcaccaccatagtcatcaccaacatcgttaccaccaccaacaacaacaacatcatcatcatccactacatcatcattataaaataggaatccctctattatcacctaacaaaaataagcctggtccacttatgaatgaactaccaggaagacatcttcaaacaaaaaatccctctatagataatggtggcaataataatgaacaacaaaaatttgatccatacaaaaggccatctaacaattctattgaagactccaaaaaagaaaacagtcaccactctaattcatcaaaacaatcatcacttggcctttcatgggaaaaagactttggacaatcaagtaatagaggaaaaaataagcacttagaagaacaaaatgatggagaacatagtaatagtagtaatgttagtattgcaccattgatgtcacattcatcatcaactggacaacaaaatacatctgttgaaaataatcaacattcaaatggtgagcaaaatcctccatcagtaggatgtgaacatagaggaccaatgtcaacctcaaaccattcgtctagctgttttgtgcaattaaacaaaagtggatctgactttaataacgaatctaatcagccatctggtccaaaaaaagaaatagtacaaagtataaattcatcacctgaatctgaacatactccatctaataactcgtcaaattctagcttcgaaaaatacttacacctttgttatagtagtgtaggaaatgaagcctctcatagtagtggtgagtcatctaaaaataatggaaacacgcaagaagaacacactttaatgccccataataacagtcccccagtatcacaatccttttatcctaaaaatgataatgaatcagaaaatgaagctagtagtgaatacagtagtagtgagtttagttttgaaaaagaaagaaattttgatcacttttcatcagaaaatggaaattctttagatggttttgaagttgttgaacatggtcctgggaatagcgcagaagtgtcaccatttaaaccaactgtacaaactggattcaaaggaactcctagtcctacaagaactggactacttttgcctccttcatcaagtgatgacagtaaatctttagaaggctcactaaaaagtggtggtgacagtaataatgatgaatcatctgactggagctcttctaacagttttgacctaacttcagaaaataaaaagatatttcttgtacaaaccggaggtcatcctcaccgtcctccaaaaaaaaacgatacaaaacaacctcactctgaaccctcagaaaatccaaatggtgaagatggtggcattcagcaaaatgaaccctcctatggagaaaacgtcttatgttttactaaaagtagtggatctaaccattcacatccatcacatagagatcactacaatgagcatgaacaaaatcctccagatgaaactgaagatcattcagcccatcatcaatcgcaatcttctttaaatgataaaagtaaatcttcttcaaaatctcgttcatcaagcattggaagtaatagtggtagtagtattattcttcttaatggcagtagttctggtgacagtttacttgaatatcctggaccagaggatgatgaaggtgactgtttaggtcgtgaatgtaaacgtaaacgtaatagtgacagtaatagtgaatctgattacagttgtagctttgaaaggctaggaaatagttcagctagttggatactacgaaatcatggtggaagccactctagcacaaaaagcaattctagttcaagtagttctattataattctagaagaaagtagcagtgaacattataataataatagagacagttcatatactgattctaatcaaggtaataacttcaacagctatgaagaagatactggtcatcaatctgaagatggaggaaacaaatcatcctcttctagcagcatacaaattctctctacaagtaatgatagtatagattggcctaattctaggaataactctgagtctgaatacgatggtgtcaatgatgggatagcttggcctggatctgctaataattctggagatgaacataatagtgatgatgggatagactggcctaatcctaggaataactctgagcctgaacacgatgacagcgatgatgggatagcttggcctgggtctgctaataattctgaagatgaacataatagtgatgatgagatagactggcctaatcctaggaataactctgagtctgaacacgatggtagcgatgatgggatagcttggcctgggtctgctaataattctgaaaatggtgatgatggaagcaaatctgattcagacagtcatccagaaggtgaatctaataacaatgatactgatggtggtaatcgtagtggtaatgacgagttatctgatggttactcaaattctagtggctcaaatggggagaacagttctctacagtatagacgtcctgtaatgttaggagctatgcccccagcacgagctacaccaagaagaggaaacccttcaggagctaacgtaaggcaagttctatctaaaacacctaaaaatctacaagcgacccaggccaaacgtccgccaatatctagtttagatagttatcgcaatgcatgtaaagcacttactcaagctattcatgctattgcacaaagttctcaacaagctatgcgttcactagctcttgctacaacgactgggtatccagatacaacaaaacgttttcgtatttttggttcagcaagcacaaaaaaaccttatcctaaaaaacatcaaccttatgctgtgactgttggtgttattgcaaatcctttctcagcaattaatcttggagtggcatatacctatacgcaacatacaactaaagatttccatatttccaacactgacgcactttttgaaggttctgcagcagggaaattacaaacaaatcacatctcactcattacagcttggaatcctgaaggatatggcttaacaggctttttagaatatgcatatggtactggagatgctacacttattcgtaaatttgcatatgataatcttgcattcactgcaaaagggaaaacacgtacacatactgatggaggaacagcaagaattggatatagatttaaagtaacagaaactattgctgtcacaccatatggagaacttgcagctgttcgtgctcgatggaataactactcagaaaataaagggaaattcccagctaacataagtagtacaaaagaacttgtacgtgaggaacgcctaggaatagaaactcgatggcaaatagtagataactgtcaaatttatgcttggggagcatatatttctagtaaaaagaaaaatggtgtaggaattgaagcccttcttacaattgatgatcatactgaaaatatgactgtttcaaaatattcaagaaagcagtccatgggtgaaattggggcagctattgcaatcaaacctactgaacattttggtataagttttaatacaagtatacgaacaaaatcaaattcaaaagtcggcttagactcacaatatataggcacaagtatatggtatgcattttaggcatgaatcctgaatagaagacatactaacacatgcaactatgggaggaaggcaaatgaataccatgactataaaaagaaatattaaaaaccttgttaaactcatgttacacaccattaataaatcaaaaacaaaaagatttcagccttgtttgtcatatcagtgtttttatcatgatctgtttcatggtatattgccaatatatgctcctgtagtagtgaaaaatagtaatctattagtcttttaacataatactatggacttattttgggctatctgtcatggtaacaagctatacttataccgtaaaaataaggaacatccaataggtggattgattctgtatgtattgttaaacggtaaagtaaacttctaatgtcggttaactgacattagaacaccatgaagaaactcaaaatagtccatagtcatagtatttcttataattttggttggtatataaggatcaacacatgcatctactttttgtcacgcatgatattgatagtggaggagctgcaagaagtttatctatattagtacaacagcttgtaaaacgacataaaatcagtatcataacatttatttcacctgaaccagaaaaaccaacagctttgttatatcaacagctaggagtatctttatatcttttcccatggggatggcttccagtttcttttattggatgtgaacccaatattgaacatcatcaagaactatgcagtagacaacgtaagtatctcccagaggtaaaacatattggagaaacagcagacgttatttgttttaatagttatgcaccaacaagtttagctccttactttcctggaaagcgaaaagtccttattgctagggaaataattgatacgtcagactatcataattataaaaaatgtacctctatgctaaagcaatatattaattttgctattgctatagggccacaagagtctagtcaattacaatcaatgggtatccctcactctattgtttataatagcagttcacatataccatattttgaacctttttcttcatttcctcctacccgttttggaatgtttgctcaatttatccctacaaaaggacttgatatcctacttttagcttatgctgaccaagccgttatattaaaagaacgaaatgtacatttgcatctttttggcattaatttaaatatgccatcaaagagtacccaagctatcagtgattttattcaatcttataaacttacagacttcattcatcttgagggatgggttaataatgtagaacagcatatggcagctatgcactgcatgatacgacctgatcgaacaggttcaccttggggaagagatatcattgaagctatgtctataggtagacctacaatcgcatctggagaagaagatgtttttgtaaagaatggtagaacaggttatctctttccaccaaagaacgttaaaatccttggcaaaatacttgcacttctttcagaagaacctactgtcttagaaataatgggtaaaaatgcatttgaatttgcaaaagatcattttaatccagaaataaatagcacacacattgaacatattcttttagaggaaatatagtcccatataagaataacaactacctctaaacatactataacctcttttgcatagcacccctccgtcaatagtaatcatagttctaggaaacaaaatattatttgatatcctaaaactatgattacttaaacttatttgactactcactatctatgatagaaaaactaaggtacagaatacgtatcctcttgcttatttaatagttaacaactaaatgatgatatctagcctaccaatgacacttgtaaaaaataacaggttactcagcatatgttcattatttctttttgatataacaagactacacactatattgaaagaaaaaacctgtttgctgttctttacatttattcttttgatcaaagcgccataggctatctaaacgtatagaaaatgtttctaataacttattttcataggataatccaacctcactccgaatatactgattatgtcttttaggaatagataaggtatattgacgactaatacctacttgagagcgtaattctttcattctgtgtttttttatgcttcttactacccatgtttggacatgcatattatcagtaatagcccaagaatggcttagtcccataaccttttctactactttttcgttattaccacttatttttgcagggaataagccagttatctcttcataaggactccatcctgatgacacaaacatactttcaacatatggcgtaagtaacattccatctactatttgaaaattgtacccaagtcgaataagtccaccatgtaatgtaatttttggactccctttagaatatgttttaattccagcatgagtaaccattcttgtatttttcatatttccccagccacaacatcctgaaagatatccagtgaatcctacagcccctgtattccaagcaacaacagctgcaagactatctgtactggttattgctttagctgcaccaaaagaccaacctttttgcatcccataatactcttttgaaatatgtttgttatgttgatatgtaagaccaacattaagcatatctgtaggagttactaaaaatccgacattagctgctcgtaatgtatattctaagtttgatgtataactatcccattgtgtacttacataaaatgactttaataatggtaattgacttctatatgtcgttgaagaaagactacttttagagttattttgcaatgacaaataacttttattcttatagatttgttttgctcttttcttaggatatgcagctggagcattaaacgatttcgatcttaagacaagcatccttaatatagtagaaacttgctcagatgtatctgacaaaagacattgcatcccttgcagcgaagatatttccccttgaatgttataacttagtaaaaatcttgtctgtatgggaaagctaaatcctatagcaccacctccaggtggtggtgggcttccaggaggcctaccttgctccacagatgaatcactaggttcaattatttcaagtaatgcttctaatttctctagtagcttagctaaatgttgtaaaaatatctcttgtgcttgaataactctctgtgcttgtggatgttcttctaatacttcatgtagctcttctaataatttttcttgattaactttttgctcctgaatttcaactagtcttttctgtataaatattccccttaaaggacgagatgttgccataaggtcagaaagttccgtttgcaatgaacttatcactgttgtaagccaaatatttccagcagctacactcattctagataaggttctatttctcactgttgactgatgtacattatttaaactttctaatgacttttgtaataaagatgttacctcatttgttgttgtttgcacatgttctggccactcttgacttggccctttttcataatcgtcccatagtagacctagtaagtgagagccaccagttgccccttcttcttgagaaaaaatccctcctgaagctccttcaccaacatcctctccagaactggttggatgtcctccagaagctaggctatcatctaaagtactatctaaattaggtaatgcaactaataaatcttctagtaatgaaaactcttcttgctctacttctggattttcattttgattcccttgaacaatagctgctgctgccaaggcatgttgtgctaatagctcttctgtcattaaatcttctggctctgcatatagatctggatcctcagcacatgctacctgttgagtatacatacaaaaaaaacataatagtatccctacagtaaaagaattagtaatagtatcccatctatgtatgactttattttgtaaaaaaaccttatttttatacatataaaaaatatacataatggtataatgacatatagataattaaataaaaaatttttatattcttgaatcataaaataaaatggttatccttataagtataaggcaatgtatgcaatatacattatataacaacgtacattatatgtaaaaatagttactttatgaataatatccataaagtaactattttttattgacactttaaattcataaaaaggaaataatacatacgtatatatgttataaacatataatctatattaaatacgtatagtatgtttaacttgataattaaaaacaatagattaaaaaattatctatttataataataaatttttttcttattttcaagaagtattataaaaaagcataacaacataaaaatagttataaaatatcaaaagttatattgaaggtgcattcttatactactgttcccaggttgtttatctgcttccaaccgatgattcccactaatattgatatgtgttctgtctgagagttgtatatcataagacattcctatttctttccaaaaggatgtttttctaacgcttggaacagacaaggaacaaagataaaaagggccatatgacagtctagacgtcagcttgtttatcttgcaagtattcaagccaaaaccaagccatgtctgtaaagctgaattgtatgtacatttccaaaaagaagtaattcctattcctctttctagctgcacttccttattgttgtttatcttagataataaatatcctctctgttcttcatagggttttctttcaacaatactcattacaccttccacataaggagtaagtagtatgtcttccactattctaacattataacctaatcgtactaatgcaccatagattgtagcttcagagttacctttaaaagaagttcctgaaggattaaaagaacgtattgtttttatatgaccccaaccataacaactagaaaaaaatcctgtaaaaccttgtccatccgtattccaagctacagtagctaaaaattttgtaatattagattttgtatttactttattaatagatgtatctgtctctactatcttgtacttattagataaatctttataattatatgaaaaacccatagttacatttggtattggatttacaactattccaacttgtgtactatgttgtttatctaaatatatattgtactcttctaatgaagtaaataggttacaggaaaaagttattggatataaaaaatagtgtagcttttcttttttttctacaacttttgtatttctatgaaactttttatgtctcctcaaatcttgaggtaaatatatagtgtttacctttgaaaaattagaactcatttgaatctttgaaactatgtctcttaatgcatgtgatacatgagatgatgtatcaaaaaggacatactgtaatccttgtaatgatctaaactggtctaaatatccataaccatgagtaaaagtagctatcccacctgctcctcctgggccttgtatattaaaaccatcctcttcttgacctgcattgcctcctggtggtgctatcatccctagttgatacaaagtttgaagtatttgctcttgcagcacttctatttgactttgtgtactatttacttgttcttctagttgttcttgctggtgtgtaatactaagagcttgctctatagtttcagctgattgttcaactataggaatatgtaaaagagttctatattgttcacttaactgttgttgttgaacttttaaactcatagcttgattttccaaatctcctaattgtccatataaagacattaattgttgtaatagctgttgttgaattaattcttgttcttgttgttgtatgtattgttgctctacatattctaaagcacttaactctagttgcattgacatctctgataatatctcatcttgagattcatatgtgttattagaataagtactatcagttgcaaatgtatatttataaataataaaaatgtatacacaagaacaaataaatacaataataaaagttttataaaatatagtagtatattttttacaataaaaaaattgtataagtactattttttgtaagtcatatatatatatatttctaacttcatatatgaatttagaaaataatatataaaaatataaaaagaattttaatatttgttccatattattgacctaagatatgtataaataaaaaaataactgtataaataatattcttttgtaattagtataaagatactccaataatttcttattaattagaaaacttatttaagtaataagcatattgtaataatctattaatagactataaaaattataagttttctttttaaagaaaaagaataggagatggatgtatctactagaaggttttagttgaagatgagaatttgtttatacttatatccataaataattattttactatttctataactagataattatctataactctatatagtgagaaaaaggaacatataatagaaaagaaaaatatagatagtaatatgtaagacaaaatagtaaaaaataaatactataaaaaatctataatctttagccttattagtgaaaataatataacaaagttttatattgtgttcattaattttattaaaaacattaagataaagaacgcccttttaaaaaatatctgttttttctccagtgattattgcatatgagcttctaacctcttgtaaatattatattttaactcttgatgatacaaaagtgttggatgtctgaaatattggaagataaacttgttaatgtatatcttttatgatttgttgtaatctatgaatgaagaaaggtgaaacatttactttcaaatctagatggagaccaagattgttctcccatagtttctctttataaatattaattgtacaaggaagcatcccacttgttttactatatgtattcaaacctacttatgcaagtatattttctacctaagagataaataaaacttttttaaaataggtgtgttatatcctagcctgacaagtacaccatataatgtaatttctgatattacttatattttttatacccccatccacaacttcctataatatatcctgttactccctttgcttttagattatataccattacttctgaaaacacatgacctaataattagaatgtgaaaactaaaaaatagtatttcagctattttagcctgtttacgtatctgtcttttataacaactaatatgtattccaaactggctccataataaaaccaacttaacctgcacaaactttatgctctagccctaaggaatacatatcaataattctaaacagatatgtattattcaagtatcttttattgtacaataactcttttacattttgctgagataatccattaaatttttttattctgaaataactgctgtagaagacatactcccttcaaattacatttcttttcttactgcatacttatttattgtactattaagtccattgatgatcctttaatctgctttaattctccttgaaagactccttgaaaattttgtagtaaacttaactgagcctcatgaataaataaaaactatgcagatgaaccaccaggcaaagatacattttctgctaactgagtagcaattttcagtggacggtttttaagtagtagttttttctcagtaacgtcaggttggtggtatttttatgatgcattagctttaccctgaattaatagctgttcttccatcaggagggaaaaatccttgctcaatttgctctaaaggagattgttcttcttcaattggtataaatatcgtttactctctatgcttaaaaaaagaaaataaagaggaaacatattgtataacactaacctattgtgacttagaggatacctattgttcctcctattgaaacgattgctcttgagacacttgtaaactttctgtttgtactacctaagatagttgttcttgttcttctaatacaagttgtggtgactcaaaacatatttggtctatttattgaagacgaagcaatagttcactttcttcaccttcaagaagaggcatttcaataaatgaggtcggagacaaactttctatttcgcctaatgataaatataataaaatttctgtagcctcttctaatcctttttcatcccactgtgtatcagaaaattggataaacgaaaaatcaatattataaaaatgtaatcttttttcttcaacagcactagaagattgtccttgattcactgacgtctgttcactcacttccaacttatctagagttgtttttacatcttgtaatgttacattatcttcaggatgctcctgagatagacttaattctttagttctttataaccctccttctgaaaaaactataaaggagaaggaggaagttggaggaggctctaaacacactctcttagcagccaaagtacaacttcttctatttcttttccgttgaactttaatatctctatgttctttattatcatgataactctttaattctttattctgtcttagttatttctgcttcaaaagaaacaatgcatttaaaaataatagtgttataaaataaaaattttacatctagttattaaaaaaaagaaagtatctcttataagagatactttctttttactatatctaactaaatgaataatagtatctaaattctaaaaagtaatagattaactaattataactattgcatattttagaataaatactgaaaatgaagtctcatttgaccagcatctaatttttgatcttttttgaatcgtaaacttccatgtaagtctaccttacaaaaatctgtcacattcatttcatataatgtaccacattcgctatagaaagatttcttcttatttcctggaacagatgtcttataaagcagtaatggagatgctaatggcatagatgtaatattacttgtggtatgctggacagtaccacctgcaacccatgtttgtaatatagctttatctgtaattttcatagaagttcgcagacctatagttttttcctgaaacttctctgtgtaaccactaatcacacatggtaaagagcctgaatcttccctatattgattccattttacaactatatgtgtggcttcaatatatgggacacaactaactttctttgaaagaggaaaggtatatccaagctgacctaaaactccacttaactggacatcaggactcccttttgtcctcatttcttttccagcctgcataacctgacgagtatttttcatttgaccccaattatgacaacctgaaagatatcctgtaagtcctttttcttcagagttccaagctacaactgcagaaaatccatctagttccatattagcttttgctgatccaaaagacgtacctaattgtgctccatgatattctttaccatggttcttatgacgattgtatgtcaaaccaatactaacatttgatatagggttcattaatagaccgacttttcctgaggatactttattctcctgattagcaagatagctatctgtatatccaaaaaaatgacaagtatttaaaaacgataataggttacttgaatcactcataacctttttaacagacctttcttttccacataaggacatacacgcttttttactttcttttgcaattagtgagcttgtttttttatcctttgtttcagcctgatataaacttgtttttaaaacaagtgtctttaaattagctgacatttgctccactgctccaaacaagacacattgtaatccttttaaagagccatattgtgactcatgattatagcctggtataagcatcgatgacatatcacccctggaagatggactacctggagatttaggtggtgaagaagaactttgctttagacgcttaactactggcgataatgactcatcatctgagctatctgaagacgaacttggagcaggccgtttagtagttaaaggaccctgaacttcttcgcctatcacctctccttcttctagcgtatcactatctactcctgatggatgctctgatggagattttactgactcttctaaatcagaacctgaaccttcttctgcaataagaacagatggtgttgggcttgataagtatccttcaatagaagaacaactgcttccatcctcgtcctcttcttgaattgtgggtaaccctctactagaaccaactacacctgtttgggaaacttcacttaaagaagatgattgttgttgttgttgctgtaagaaaaattgagaacgttgctcttgggatacatactcatctctccatatgtcaccctcttctccctcaagaggcggcatagaatcatctgaaccttcgtcctctctacttaatggtgaacaaggacttttattttcctctccatgaggaggagatataattacagagctacgacttgttgatgactgtgattgtgcttcctgacccagtaaggcttcttgaaataaagctgcaacttgttgggcttctagcttttcaatttctactttctgaatctgatgttgagccatcttcaccatgctttgtaaaaattgaacttgacgtactgcacaagtttttaatttatccatctgctgttgatgtctttttctttcttgctgtaatttttcttttaactttttaactttttttttcaaattgctaataacctcttgttgcatttgttcttcagaggatgttattataacttcctgtacctcttcactttccgaaagaaaaaacatctctgatgtacctaatgctgcacttgtagaagatgtactagactcagaactttggctagatgattgtgatgagtcttcaccagtttgtactgccttatctataaattctttagaagaactactttcctcttgaagaggaaacacctgctcttttacatttgatgtctcttgttcccatagtaataaaaattgattacgactatcactaccaggatttccttcctcttcctcagaagaagaggaactttcttctgactgttgttctactgaactatctgaatttgtagatagttggcgtgtaggttttactgaaaaagaatactcataattaaataaaatgtaacacatacatagtaatattattatacagtagtttttacattttttagggaataatgataaatagttatgagtatgttcatatatattatgtataatgttatattgatgtgataaatccattttttattcccaactaaataaaaatttttatgtaaagcataatttatattatataaaaagaaaaaaatttctttatatttaaaaaagaatagtataaacaagaatacttctatcttattactataatatagaattttattcgtcttttataagattaaattattcaatataaataaatgactaaagaaaaaaatatttttatacatactaatatagtatacttatattaaaacgtgtacaaaaagttacactgtgtttgtatataaaaaatatttttcatattatgtaatgtaaaacaattccttgcatgtatagtgagcacatcattaatagtgtactcaaaagagataccagtttcactatagatatcgttttttttgtaaccttgtagatatgatttatacagaggtttagattgtagcagcgatgatatatttaatatatttaggttctgttgtctataatttttttcaaaccaaaactgaattgaagaaaaatctttaattttactgtaaagacaaagacctataacatgatcatatacactttctttatgtttatctgatagatagaaaaacggacttaattctttatagtaactatttgatgttcctactacatatgatgagccaatatatggcattagagaatgttcagatcctaaaggtatcttgtaccctaactgagctaatactccactaaacctgactggtatactttttttcttggttatattaaatggcattgattgtatggtatgcatttgcccccagtaatgagcacccatgacacaacctgttagaccacacttatttttaccccaagaaagtgtagcaagcagtccttttatctgtacttttgctgctatagatgaaagtataccattgtgtattttagaattatacttgttatgatcataccctaaaccaagagttatgtttgaaattgtatttgaaacataacttctctttctagtttgtggtcttgttgatatacagaaaggacaatccttcatcattccaagcatagactgcatcctcttatcacttaagggtatgtttgggattactgtaacccccttatctttttttatgcgtcctgtacttgttctttcaagagtattaaaaaacttctcatctatatggttagataatttatcagatagattatttgttattgttgttgctaactgcttaagctctattggaaatcgagctaacatatcatgaaaaacatattgtactcccaatagaggttccaattgtaaaacttttttatagatagcaactaaagaagatgttctatccttcgatgactgaatattacgtgggaacaaatatacagaccttgaactttgagggtatggctgtgactcttcatcagaagcttcacttgatgcatcatagtccgatgattgtcctatctgtctttgtactaattgttgaggagatagctttgcttcttcgtcagaagaactacttaaatctgtttctaaacaacgcttacgcaaactagactctctttttttgggtggatcctttaatattacttcttgtagtatagaatttcccattcttatttctttattagggaatggtggtagaggatgcccttgttgtcgagcttgttcaatcttctccacaagcattatacgaaatcttaacataaggtgctcattgaaaatactattatatataaactgttgactatttagtatacgttgaagatggtcattatttaatgctataatttctgatattccttcttgttgacctactattaactgcatttcttctattgctacaatatttgcttgcaactcttgcattctacttgttattgattgtaagatgtatgttaattgtcctgttaatctttgttggttcaccttcatacgttgtatttcttcatagttaaatgaatcttctccctctctacttattgtatttaagtaaagatctatcatactattttgcgtagttaaactttctaaatatgatgtttgtaattcgtcaaaatatagaaaattcatatttaataagttttttatatttatatattcttgttgtgcttgtataaattcactagctatattttgttgttcttgatgtgttattctagtgctagatacactcttctcattaacctttgctatactactacaagtatataacatagataataactgtgctaaaaaaaatatataatactttttatgtatatatctatataaaaaaattttatttgatgtatgtaaaaaatacagtatacaattttttaaaattgacatagtagtagacattttataatttttacttagagttaattagggaatatataattatgaaaaactatagtaatgtatagaatagttttactataatcattatataataatattaatagacatattgaaaagaacattggatattttgagtatgtaatgtattattagtatagttgaatatactatttaaactcatacacattttatcagaaagtttcattgaataagacataccaagttcattttttatgaaccgcttttctaatactggtaaagtcattttatacacagggatagaaaaaagtaatgatgttgctttcagcttagttgtatttgaacgaccaaaaatttttgaaatccaagcttgtatgttagattgtggatttatattccaatatccacgtaatccaacacttctttcccataacgcttctttataattactaatattactagacactactccataatgttccttataatttttccatcccaaagtaacaagcataccttccacataaggagtaagtctaataggtgatgaaatctgtatattatatcctaattgaaaaagtcccccattcaattcaatatctggcttactattaacactgattttctctcctacaaaaggaacatatcgtgtattgggcatatacccccaaccataacaacctatagcttgtcccatcaatcctgtctgctctgcattccatgaagcagccaaagaaagaatatttgttgttgtttttgccttagctgaaccaaaagagttatgtcgtactttaagcattctattttctaaaaaatcatatgatactccaagctgtaaccctgttacaggaaaaacaataacccctgcctggattgcatgtggcttatactctaaatttttataataaccttcaactgaagaaaacatatgataaggagcagataagtgagataataatgacaactgtggtaatgataaatcagatatcttcttttctttttttctaaaaatatcactatgaaaaaaatgaggtatattacattttgtttcatgtatgcaaaaggtatttctcaaagaccacatttttaaaatactcgagacttgtgtaattgcattcccaaagatacattgtaactcctggagagaactaacattacccaatatatcgtaacctgaaacaaaagctgcactcccttcccctagactaaaattcgccattgaagctgaagcacctcctgaaggcggtggtggtttaggtccttggtcttttccttttaatataactgaacgtagtccattttctgattctaatagtaacatcaatgccttttctaaattactttgcaactcctgcactaattctacattttttatatgccctcctgcacaagaggaaattttacttttcaaatcatcaagagcagcttctaattgtggtatttgatgttgtgcattacttaatctttgttgtattgcctctaataaataaggtattctaacatattgaggtattgtcattaccatggatagaataagttgttgtgtggactgcaacttttctgtaacagactcttcaagcgcaagtaaatttgttattacattatgtctatcatggatatatttctgttggttttgtttaatttgatttatttttacttcatatttataagtattacttaataaattatttaaactatgaatatgttttgaaacatctattccattcttaatatcgttagttgctgtttgtaataatcttcttaccatactagactcattaattaacatattaaatatatcgttctgtactatagtaaatgtttctatatagctttcagtcattcttaatattgcatctgatgtatctactcttatatgagcttcatacatatattgtattaaattatttagtgatgttgaaatagattgtaattgtttcatacaccaattaaattcatcatatgtatctcttttacctatatcttcagaatacgaatttttataataacataaaaataaaagtataaaaataattgtaattaatctaaaatagttctttttaatagaaaaaaatttactatttatagtatgtatgtatgtatacacgtatctttcctttaatgtaaaagaatatataaatttactgttacatatatataacgttatataacattttatataattttttcattatttaactctatgtactatgaaatttttatatataaaaataaaaacagtaatttatcatatctaatgatgtatactgataaagtaatcaaaagttactatttatatgaaatttttacatgtaaatactatgtttatacagtatatgttataaaaattatatagaattaatacatatattgtaaagaaactctcatagttttatctgtaggtttttgaatatgcgaaaaaattataatactataaagtccaatagtacataagtctgatacatacacttcataattaatacctaattccgcatgttcataattttttctctttagtggtacagtagtatgataactataatcagaaaataaagtatcagaatgcagtttacctatattatattgacctaaaacacctgcaatccatagttgaagttgtgtcttactagaaggagtatagctatgtcgtaaacctacacttttctcacaagaagtttctctatagtcactaactttacaacggacagggcctattgactcatgatatgcattccaagcaactgttgtaagcattccttcaatatagggagtaatcgtcattacatttgatattgggaaattatatcctatttgtaaaagcccaccactaagattaattctaggcatccctttagaactagcttttcccctaccatgtatgaaataacgtgtattatttatatctccccatccacaacatcctgtaatgtgtcctgtaaatcccacgccatttgtattccaactaaaaatagaagaaaaaatatgtattgttgaacgtgtctttgttactagagtagaatcttctttatatttcctagggatttcatgaacatagtcataacctactcccatagtaaacttttctgtaggacacataacaaatcctatttgtgctgagcaaagtttgtcctcaccatttgaactatatttatctgttgaactaaatccctggaatggaataaacacatctaaagatggctgagatgatgaaacaggctgctcaatagctgtcttacaaaagcgcagcttaggagaagtaacaatagtattaagctctctttcagcataattttgctttaaagatatagccatagtttttaatgatagcattcttagtagatttgaagcttgattaagcgtatttcctagagaacattgtaatccttgaagagcacaaaagttactttcaacatcataagctgtgaaagacgccgaagcacttcctaaagaagacccttcaagtgagccaacccccccccccctggagatgatggtggtggtgacgggggacgtgaagtttgatgactactatttcctgtaacaataagatagcattcagctacaatctcttccagttgcttgtttttctcttcaacctggctagccttgttctcaacaacagtatacaaagcctgtaagcaagaacgaagtctctttcttttttctataccattccatactgctactgacttctgatttatcaatgtcacttgttgttgtagcacactattagtatatggttgaggtggttgtatgctaaagtttaaagtttcttcttctacccgttctaaagtactgcctataagttctagctgatctactgccaagtgttcgctatctctcacttgaaattgatgaaaattaactcgttgcaattgtaatagaatctgcctatgtatccttgctctatcttttccctgggaataaactttaagaattgttttatatgctgattgtagtatcttgtctaaatctttaggtttcatctgacgtgcacttagtatagttgaccgtattccttgtatttctgtagtctgctcttctaatcttcttaatgtttctgtgcattgacgagatgtttctcccagtccctttaaatcatcatccattcgtgcacttaaagattcctgaattgacaatatttcttgtgcttgctgattagaagattctagtaaattcttcattttaagaaatttttgatatttcatttgttgtttaagacttatactgtcatcagcaaatgtttcttttacattaaaaatagaaaataataagaatatagttattatttgtaataaactatatgtatatttttttcaaaaatattttttatatgtaaaaaaaagtacaacatatttttgcaacataatatagtacatattctaactaataatatatatatataattttattataaaaagataaattatgtatttttatcattaagtaaattacttttaaaagtaactatatttaaacaattaaatagtatactttttattaaatattattaatttacatatagcatgttaatatatatatattaatataatgatatatatatataataactattaattttataatttaagtgtgttaatatatagattttatatggaaaataatataatttaaaatagttattgatctatatcaaaatctatttctttttaataagagcttattagtataagctttaaacactataatttatatacatataaaataacagtttttttaaatttttaaattacaaaaaaatattatataaacatataagtatagtttatctatattatgtatgtataaaaataactatattatatagtttatatttataacgtactaaaaaacatatgaatactacattttaatagaattttacttcattaatattagatataaatatactattatagtagtatatagttaacttcataaatagcttttctatatttagaataaattctatattgaacatatcttccctatgtaagaagaatatgaattctaatggaataaagaaataaaactaaaaagatagatccagttataactaaagatataatcaaaaaaaatagacaaaaaatagatacaatacaaatataaaaatgtaatgtgtaataaaaatatttagttacggactacaaaatttatttatgtattgattaagaaatgttataatctatttatctttagttccagaagagattatatattctttatattataagacataacttgttttatcttttataacaagagatatttttttaacaacagttaataaacgtatcttattgtaaaacttgtataactagtaacatcttttatgcttttagttacccttaacttactataaagctccatagataatgtatccattacatttgactcataagaaatccctgcctccctatggatatattgcttcttataaccaggaatagatattttattcctatagtcagataaactaagtggtttagaagctatttcacctgtattatgatttgtaaaaatatgagaaccccaaaactgtagctgggaattatctgtaattttccattgattacgcaaacctatacttttctcacaaacatgaactttatgtccactcactttacaaggaataagacctgtatgttcttcatatggatcccatgctactgctaatctcatatattcaacatatggaataagaaaataattttttcctagtaaaacgttatatcctagctgaataaatccaccactcatatgtatacttgaaatacctttagaaacactttcgttatcaaaaaaatgtattgtacgaatatttgttattttcccccacccataacaacctgctaaatgacctgaaaaaccttgatgttctttattccatgtcactgttgctaaaatgttatctgtttctatctgagcttttgcagaaccatctactgagtctagtacaactccatagaaattttgagttttctttttgttattactatacaataaagataaacagagtccatcgataggtgttgtaaaaacccctgcttgtcttgaagaaatagtagtctctaaattagatatacgactatccatagatgcaataacatgccattgctgcgaaaaaaataatgaattattcacagaagttggacgtatttcattatctgttgagtgacttcttcctattcctcctttaattttagtctgttttttactttgaaaagtatgaggttgtaactgattgtcgtccttacaacaaacacctaaaacattaatggatctaataatagatagtcgtaattgtgttgctaactgatcctctaaactcattaacgtactttgtaatccttgaagagaactgacttgtccatatgtgtaatatggcataagcatagaagaactccctggaggagagcctctatcagaaggtggtggagtatgagttagcttcctacgttttgttggcggtgatgacctttgagactcaccatctgatgttgaagattcatcgccagaggttaaacactcatcatctaatatctcctcatcactgctagaaagctcttcttgacattctaaagtcactcctgaactagatagatcctctactgaaggtgaaggctgtaaagttgagacaatctcagaagatggtcctggctgaggctcttgatttagtacattttggggaggatcatctcctaaaggagacaatggttccggaagaggatctccaaaatctgggaattgaaaagtctgctgtggcaatggtggtggtgatggtggtggatcaggtaaaagtggtaattcaagcacttgtggtgtaagtataggtataggaggatcaggattaccttctacacgcgctttcagtacttcaattcgatacctaagtagtttttgtttattccccaagaaaatatttttatttttatgtcgtgatatagctacttccatttttcgtgcagttctttgttgatttgctgtatgtaacaccttattttcaatggaagccacaatttcttctggtacacttactactttaccctcattattagtaggtaaccctggttgacactctattactgcattagataaacgctccctagtctgacgatgcagtacttttgtatgttcactagctgtttcccatattttaagacatctttctacttctctattacacccttcagcttcgtccagtagaagatatatgtcacgaagactgctttcgacatctactaaaagcacaggttgtgttcgctgtatcacctctaatcttaaaaggttggcttctatagttgtaattttattttcctgagtagaagtatatatatttaatggtgtcattgtaactacaatatctgaacgaagctcatcaaactcatttacttgtaatttgttatgtaaaatcagtttactcttcctatcactatttttatcttcatagcctatacgagcattatgagataacgatacttgagaacttattattacatacaaaaaaataaatgttcctattctagcatacttttttactttagtagtatctaatatttttacttcttttttaagaaagactctattaaaataggatataaaactacctaagagtaaatatatggctattgtttcatatatacatataatataaaatataataaatttatacattagttattttaaactaacctcatgaaatacttttttactttaaaaaaatataatagttattagcaaaaactattaacaagttaatattttttgctagtgtataatatatttatatagataaatttttataattataagaattaaattatactattaatatagttataaaataatataattaaaaaaatgtatatagtataattattaaatataaaatataaaagttcattaaataccaaccatgtataaaggtgtaaaatatattataaaatcataacatattatctatataaaaaagttatgtattataattacaattaaatattagtattacactaataacctactaataaaagtagaatactaactgattgtaatacagtaatagaaggtttacagaggaataaaaaactgaatattcagcaagtattaaacagtgggtttagtataaagctagaattgtgttaaatataatacaaaattatatattgtcaactgtcttaaaaaattatatctttctatagttactgaatattttattttaatctatatactataaatagtatttacagtaactatccgtcttttttatcacttttatattcttttaataatcaatatgtataccttagatgaactgttgcattttgtatatggcgtttattactattaaattgggcgttactattcaaaacaatagtaaaaaaatcagtaagttttgaagagtatgataaccctagctcagttctcatatactttttcttatagtttggaactacaatagtatatgtatttggacctctagtcggttgagaagtaactttatctacatttgatgttcctgatgtccttattccccaacactgtagctgagtagatgcagaaatgttccactgacaaaatagaccaatacttttttctaaacagacttctttatgactactaatagtacaaggaagtacacctatagtttctttatatgaatgccaacctactcttgataatatgctttcaatataaggaataatggctaacttttttgataaaaggaaaatatatccaatttggatcattccaccatttaggtgtatgtctgtagagcctttagaacatgcttgattgtctgcatgagtaaaaaatcgagtattctttaactgtccccatccataataaccagcaagatgccctgtaaagcctgaaccacaaggataccaactaaaaatagtagaaagtccatctgtatctatataacttttaacagaacctattgctgttccaagctgtagtccactatgttcttgaacatcttttttatgacgatcatacaacaacttcactgtatatccgttatgaggagtaaacattactcctgcttggcttgaacgaattttatgttctaaatttttactgtaagagtctactcctccaaacactctatatggactacttatgttataggtatgttgaacagtgtcatactgaggaacagagctgtatctctttcttgatattaaatttgtaaggcaacattcattgtctttatcatactgttgttgtcgtgcatgttgcacaagtgattttaactctgttgaaactttttcagaaacatcacataaaatgtactgcatactttgaagagagcttatttgtcctccaaaactaaagcctgggataaatgacaaagaactatctgatgccccaccttttgaaggttgccttggtcgagcgccctgtaaaagatagcgttgctctaaagatatagactgttcagattgttgagtagaagaagcttcttcgctctccccttcagtacatgctgttgatttttgactaacatcactttttgaggattcagagtgctcaatttcttctacttctccaagagtttcatctagtaatgcatttccaccaaaccaacttacatcatgtatttcccctcgttcagaagactcactatcttctctactatcatccaaagagaggagagccatatctacacttgctactatttctgctttgcttctcttttgcctcatagcctcttctagataagggaaaaagggtggtctgctttgttgagcagagagggtttgacagtgagtatcatatgctatgaaggcatttgacaatacttctgtatagctccatgttagttcttgtagtattaactcttcgcgatgattcaatatgttatctggaattcttctttgcatctcctggtgttgttgtactaaattatgctctaattctactcgtagctgttctaaggcatctaatgctactctctcttctctttccaaacattctgcctcttcctcttcgtctataatttcttgtaggaatgcatcacttccatatagaaaatccatcattctattaaaatatgcgttaagttcttctctcctaactcgtagttgaaaacgagtcctaaacaccggacgtagaattctagattcactttgttcaaagatattaaaaaaagattcactttgtccttctgctataagtcgttgatttatttcttgactcctcaatatttgttgttgtttttcctctatagatctttctttttcatgtcgctcctgactaacgttatttagtcgatcaagagcttcctctttatatgtatccatccaacatttctgctcagcaacaagagaaggataggctataaaactttcaactttctgttttacattctgataatgagtaacttctctacattgtttttctatcatttcacatcgttttttctcttcttgtatttcctcttctctttccttcttctttcgatagcgtctattttcatatctatagttacattcttcactatgatttctacccgtaacctcagcagcaaactcaatggagtctagggtattgtagaaacccatatcaataccagtagcaccttgctcttcttcttcaccttctgaagatgaagagtcagtttctacttgatccctttgaggtatgccacttagcctatccatagcaatagcatgatcatgcttagctgtgcataaaaaaataaagacccctgctacaaaaatgtagtacgtcttcaataattttttttgaaaaagaaataggactgttaaagtataagaataacatatagtgatatatatatatatcataaacttattgaataacacttactattcctctatacaatatttagattagattttaaatacattaaatagatactaaaaggtatctataaatagatagtgacttttttataaagtaaaaatacgttataaaagtataaaaataataaatatgcctattgaataatgtctattgaataataaataactacttatatagtaagtactacattatagtagtagttgtttataaggaaaaaataattataatatatttttatatatgtcaaaaaaaaatgtactataataccaaaattaattatagagtacaattactataatacgtagctatgcttagtaaatgaagaatacataacggatataaagagtttatgttaaaaaaagtcagcaactaattactattataatatagttttgttgaaaatacctacttgaatatacaaacttttttcttttccaaaagttgttttcctatgtagtttaatagaaaggaataattttatattatgcaataaacctatctatgctcttctatattgtttcttataatcaaggactaatcttcaaaatgtaaaagaggaaatattactgtactaaatgctaatccattaactttttgctttccaaatacttctacaaactatacttgtaatgatgatgtattggtaagcttataacaataacgtataccaatgcttcttccatactgctgttactattaatttgcaagaccttagccttctctttgtatgaactccattctatattgtaagaagtaatacgctttctaaaaaaataagcctaaataagcaagttcaccaattaactataccttagatgtacctttacaaataagttatcccttagttttatttagtgaacgaaaactctttacctcacccaaaccaaaaaagctaactctgctataggtcctaatttatctatattaaaaaataataacagaaaaaacttttgtttttgctttgacagaaatatttattgtcctttcccatatagtacatatcttgtctcttcattatagtggttacatgcaaacccaactgttatactaggtataaaatcatatactacaccatattaagcagattacactttatagtctaaacttctatgatagatttttatagaatcaaataagctacaaacttctcctgtatttttcttctattctaaagaaagtattgtttgaaatctattctttctagctacaagatgtataattgaagcaaaaaaatttgttttaatttgcagaagatcctgagttattaaaactaataattttaatacattgaaaactatccagcggttcctaataaaacacattgtaaatcttgtgatgaatgatttccagtttcgtcttgttccttaccattgttatttattgaggctgaatcattaaaatataacatacataactataggaagtgttataaaaacaaaagtcctccatgttgtgtcttaataagactatagttaattgttaaaatggatatacataattcttaataagattgtataaaatttttgaataacaaagacaacaaagtatatacataaataataataactatacaacttatgtaaataagatacatagtgtaaaaaaaagtaatggatacttcgctaataggatctataataaagggttatttaaaacacatattactcaaagtaataatagagatatgaagaatttcaagtaaaacaattaggtagcttattatagtgaacagatatgttacccttaataagctaccctctttatactgtcaaatcattatcattaataaaaatatttcatacaatatactgtagtataacacataattactatgtagtaatatactatagtcacataataaactattaatactcttaaaacatatactggaaatgtacatttacttgatgttgaggcctcttgttagacttatcaagttgtgcttttccttgaaggcctatctcaacatttcgtgttacctttgatttataagacattcctaattctgcttttgtactttgccttccatgggatggaatagaggcttcatacttagaatcataggctgctatcagtggttttacatgtaccttgttggtacttcgatagctagatacacctgctacccaggattgaatacaacttctttcagttacatcccagcgactgcgcaatcctatacttttctcaaacaccttttctctattactactcacttcacaaggcaaaggtcctgagttttccttatatccattccaggttacatttgaaaccatacattcaacatatggagtaaatgacacttgttttgttattggaatagtgtaaccaagttggataagccctccacttaaactgatccctggagtaccttttgatgttacttgtgctccatcatgggtgaatgaacgttcgttctttaactctccccatccatagtaccctactacatgacctgtaaatccttgtcctctaggattccatgcaaccaacatacttagtccatctagctcagccttactttttgcagaaccacttcctgcactaaaggatattccttgatattccttgcctgtatctttatatcgattataggctaatccaacacttaatccatccttaggggttacaagaagtcctacctgacttgaacctagtttacattccagatttgtatctttagtgtcagtaaacccaatcacttggtatggcattaactcttgaaaagcactctcctgctgtaatgcttgcatacctatctgtttcttcttttttatagaagcactactatcattcagctgaagaacatcatctttcaccatagcattgttctgtacttttagtgctaaccctttcagagtaaaggcaacttgctcagatacatcaagtaaaatagcttgcataccatagagagagcttatatgtccttctagactataccctgggataaatgttgctttacctcctggtccacccctagatgtatctttccctctcaattttggacgtgctccttctgtagaatagtcatgtgaatctcccccctctgcctgaggttgtgtctctcctgattgtgaggtttgtgcttgattacctggagtttgctgtacttgttgttgttgttgttgttgttgtgaatcttcttggggaccaacctctcctggtgactcttgatgagttacctcctgctcttgatcagatgctgtagcttgagaggaaccctcaccactttgatccaaaacattatcaggtaaagaatgagaccctgcttcactagtagtagctgttgtttcttcttctttctgacctgttgtactagaaggtgtactatcattccatggtcgtaaactatcatctcttaaaggagtagggtgatgatgaatccttgtaagatacctattatcaatttgagttactcgactactaattattggttgttcttcactctcgctttcatcttcactatcatcaatgtcaacatcagaaaattcacattcttctaatgataccttagctactgtctctttttttacaccctcttcaacatacccccttttctccaatactaatctacagttacgctctatttctgctgcttcttttatattgcgttctctagacttttcctgtacccaatcttgtgcgttctttttagtatatagagtaaagggacgatagatttcaggagaacgaatgcttgcatcatctattaaatctattttgaactcattagggcttacgtcaatcttcattatactaagacgactctggagttctgtcttttcctgtgtaattacatcacgatcccctaatttttgtaacaaacaaagcatttctctatctagttcacctcctacattttgaatttctgacaattttttttgaagaactttaacacttgctccatacattttttctagttctgcatcataaacttttagctcttcttctttttcctgtaactgttttgatactttagggtattcatctttatgttgataaataggctcctgtaatacgtatttaacattcttaaactttctatcatacatttctttgcatgctctattaacttcacttaattgtttattaaaatcttcatcctctttttctcctccataaacgcctgcttaggtgacattttttcaccacttaatgctgccttgttcctattattgtgcccattaacccacctctctctaactaattttaactgtcttacttgatcatttcgtctacgttcttctcttaatcttctttctccttctcttagccttctttcttcttcttgaacctctgctcttacttgttcccttctatactcttctcgttctaaccatgcttctcttattgcttcttcctctcttcttttaagtttttcctcttctaattctccccccatatctaacgactgtaaaaagttagcaaagtctctatctttaattttatcaaaccaactttttggcctaacaaatgctctgtcttttatacttcctgtagcaccttgtaacttctcttcatcactgcttggagaagattcctgttgagacttctttatactcttttttgatggattaggtttgtcctgtccattcatggcaaatgctgtaggattaaaatacataacccagcttaataaaaaaaatattgctgtatacttataatgacattgtcctaatctttttagaaagtttaaaaatttattatatctatgtataatgttttgtatttgtgtattaaaataaatagtagacactaatttatacattatttaaactccacaatagtatacaatactattgtatttattttttatttattaagtaaaattacatagttgttactatgtaacttatagtaattacaactttattatgataaacgatattacgaatgaataacttatgaaatgtatttgaaagtatttaaaagcatagtacaaaaaagtactatttatttagactgtagaagtatagttattataattaaataaataaggatatattttttaatatagttaaattaaacgtatataaattttaattagttatatatttgtagatagttaacgtaataaaaatatattaaaaatattttatttattgtaaataaataaaatattgtcttattattagaaaataaaaattataataaaattaatttttattataatacatttataaaattatattacttatttagatacgtgtatgatgttttttaatatactctaatttagtattatataaaaaatattgatatctaaatgatgtactatagttatataataatattttatcaacattattaagcatatcctttaaatgtacttttacttgttctaatgatttataatgacgtatattataattactatagtattattttgtatattcaaaaaggttcaatgtaaaaaaatttaataaaatagactttatatcatagcaaaaactcttcttttatttaataagagtctcctttagatacgccttcttaaggaataaccattggtttactcttcctctgaagccatcctaacattggctgttctagaaatagtttcttcttgaaagaataaggtgtgtgtgtgtgtgtgtgtgtgtgtgtgtgtgtggagaaaatttcttactattcaaacattagctaaaaatatttttaaactagtgttatcctaactaagcattactatagagacatccctaaaaagagaacttatatagcctacactactttttattaataatggtaggctaaagataacgtcaagtgagaattatccaactttttcttgccaatctttgcaattacattcaagtaacttattaacgtagttgtaatttttgcttgatgagaaatgccaacctcaacttgtgcagactttctatctataccaggtacaactgcctgatacttcttcattggagcacacagaaacatagatgttaactcggctattttatgataaccagtactataagcagtccacatttgcagttgagaattatttcctattttcccaatagctctcatccctatactattttgccataattgttctttatttttacttatactacatgcaaaaggacttggtacttctttgtatccattccatgttacaacagaaaaaatattctcaatataaggtgttaaaaaccaattgttagctaatggcaaattatatccaagctggacaagcccaccacttaaatgaatcttagaacgcccttttgcttctaattctcttcctatgtagcctatagagcgatggttctttgtattaccccagccataataacttgcaaactgtcctgtaaatcctgctttatctggattcaaggtaacaatacctgcaagcccttctacttttgtctttgctttagctatgccacacgctgaatctaactgtacttctttagaaaaagaaaaatatttattttgacgatgatacatcaaccctacatgaacatatggagtaggattcatagttaagcctaattgagctgaacgacttttacattctaaatttgattcataattatctgcaactatggaaaaatatcttaaagaacatggattctgtaattgtacatatgaacttattatgtcagaagatgcaatctgacttcttggtctagaatctatttctaatgactgtccagtagtatgtttattcgtatgttgtaatgctaataatcgtagtgtagttattactttctcagcggaacctagtaatactccttgcaatcctaaaagtgaatttacttgaccttcatggctataaccagggataaaaaagcatgtctctctttctggaaccaaaaacacatccccactcccccctgaaggacttcccttagttttttgctggtctgactgactattaccacttgaatcttgtttattccctgcagtacccttatcactcccttgtgggttatgactttcacttttaccatgacactcagattcggaaagaagacactctcctcttgggatccatacctcttcctcttcctcttctatctcttcttcactactactactactactactaacaaaacaaagctttaggtatttctggaaactactgttgctactagtatcactactaatactactactgctactactacatgtactttttaaagaagatacttctgtcagactacttgtagaacttgtgacacttcttccattcattctactttgatcataaacttctttaaacaaaggttttggttgttgagtaaccactgcggctatattattctctgcccttgctgaacactcactatctctagctgtagaagcacccatcatacaaccataagctgcaccaatagtagaaccaacaccagcaccaagaacacatcctgcagaagctccagcaacaccacctccgacagcacctacagaactaccaacgatagaacctatagccatcccaccaaaaaaaccacagaaggtactttgataacatatactacagtcttccattggcccgtattgaatggcatctacagtgtcaggtggtctacttgtcctacctcgtaataaatcaggatcaccataaaaccggacatataatggaatattctctgatgaatttgagcttacacttccatctctgttcatagaaaaaacattgctgcttaacatatgcaaaaacaaaacaaaaaaagtaaagacgacatgacaccgcttactttttataatatgacaaaagaaaagatagaaagacgaaagtgaatatatttgatgagaaaaaatacaattttgaaacagaagaaatactatcattataataaaaaaatacttttttgttacttactatagtaattaataatagtatctaatgagagagaattacttttttatatctatacaagagaaagcctctataatgtaaaataaaactagatactgttattaattataacaaactacattagtgtatcttaaaaagatacaaggcttatctaagtaggaataaaaatataagaaaagaaactagataagatatctttatttactgatatttcaataaactgtcaaataaaaaatgatctaatttattggaattaatctgtttttttagccattataaataatttgtatattcaaaataaacactgtagatagtaagtcagtgttgtttgctgattctcctgttttccttttcaagacatatccaagaataaagaccaaaatctacatcatccataaagtctttatgctaagcaataccaattgttgcctttatatgctgtttttagagcaggtacatatgtgtcatatttccattttaaaaaagaaagagttccaataaatatagaacacttttttatacttactttttacaaatagagtatttcaataaaataagtctatcctcttttggacagtatagatacttttttagtgtaaatacattaaagaaagactcatacttttttcttttattttatgaaccttatctaaatgtatcattccatcaatgcctaactgcagagtatctgtaactgacatactgtatgatgctccaaattctatatgaacatactttctttcttgtaccgaaatataggattcatacttcttaataggcattactagaggtctacaagatacaccatctgtcctacgttcaccagaaatacaagctatccagctttggatctgaaatccacttgttggcttccaatgatggcataatcctacactcctttctgctacatactcttcacttctacttatcttacatggtaacaatcctgaacgctcagtataggcatcccaattgaccatagacatcatcccttctatgtatggggtcagtattgtggtctttgacaaagagatgttataaccaacttggatcagtcctccatttaagtagatatttggctttcctttagcacttattttactacctgcatggataaaggaacgagacgtcttcatcttaccccatccatgataacttgctatgtgaccagtcactcctccaccttctgaatttaacgctattactgctgagagtgcttcagactctgttttacttgtcacagaaccacttcctgtacctagctgaataccttcaaaggacttcctaccttcattatgacgtgtataggctaatccagctgtcattccagggaaaagttctgctactaatcctgctcggcctgatcgtatcttcttctctaaattgcactcatacttatccgtaaaggcaaacattcgacaaatagatattccttgtgggttgttttgaaactgaagatctgctttaagtaccctatttggaccttgcaacttttgagattttttccctaattgtagagatgctgctgcatcagatggtattctatgtgctttaagggctaacatctttaaagtactagaaacctgtgcagatggacctgctaagatatactgcatacttaataaagagctaatttggcctccacgattatatcctggaagaaaaaagatctcttcatatactgttccttcagaagatctccgactggatccttctccctgttcactattgttgtttactggagaattaatacgttgtggttggttagttacaacttgttgtctatgagaaaagtcaactagttcatatccttcatcttcatctgataaaaattgtctatttaataccatatattctaatctttgttgagctgtatgaatacgttcatttttttcttctactttattagttaagtagccaaatatactacccaataaacaacaagtaaggccacaacaacccattgttattgcggttgtttgtgttattccttctatagaggatgcaacagtagttaacgtatgcccactagtcatagcagttgctagtggagtagggaccgtaaatatcatctctgtaggagcaacagttggagtacataattctattagttttcctaccccataaccaacagctatacttatagctccacaacatcctccttgggctgctgcaactgcatatgtttgtttatttttacaacaggttttacaacatggacaataatcgttaatacttttatttgcctcatctataacaactaaactatgtttttttatatagtcttcatatacatctgcagatatagatactcctttaatatctactactgtgcaaggagtttcttcttcactatgttgttcggtgttacctagtgttctatggtacaaattaaattcttcattttctctattcatggcatgaatatctctaagaaaaataaataaaaataaacaataaataactaatgtaagatattttttattataatatatattataatactgataagtattcttatatattagactatattttttatatttattttctaataaataaatatatttaatgtaataaataattatacaatatatttttataattattctatattttagaagcatattaattatcctatttttatagtataaaatttttaactatataaaattattaaaaattttctatgtaagatattatttataaataacgatatatgtttactttatttatagataaaatatataaataaaagttaacaaactatgttaattagttatataagagtaatagttataatagtgattaaatatgttaaaatacatactgtacatatgtatttatttgttgattatgtagcttttgtctttttacaaaagaaaacaacattgttgctcccgtaaaaagactatctgtaatctttgatacgtaggttgctccacactctgctcttaggtagttcttatttctcattgggacagaaacttcatacctcttcataggtgctacaagcggttgtaaacttacattcgatgatgtttgagaccctgagatgcctgatatccatgtttgcaaaatagaactctctgaaaccctccagtcacttcgcaatcctatacttttctcaaatatactctcactgctttcgctcagtttacatggaagatctcctcttttttcattgtaaggcttccactttgctatcgataacactccttcaacatatggcgttactgaacaactctttgatatatataaattataaccaatttgaaccaaccctccagctatacttatagctggacttccacttgaggatgtttctctacctgcatgggtaaaaaatcgcttattctttactgttccccatccatagcaacttgcaaaatgtcctgtaattcctggacgatctgcattaaatgtaacaactgctgctatactttctatctctgactttgctttaacagaacctctacctttacctagttgcatccctgtatattcttttttttcatcattgtgacgactatatgtcaaaccaaagtgtactccattgcataactcagcaattataccagcttgacctgaacgtactttacgttccagatttgccttataatcatctgtaaatgcaaatacatagtaaggaatgtgtttttgcttctggttagcaaaattttttgttgcttttaatagttttccataattggcaatagatggtgaggatactttattaccttgaagagacaagtacatttgtggaattttttcataagcttttaacgccagtcttcgcaacttttgggggacttgtatagaaacgcctgtcaaaacgcattgcatacccaaaagtgaccctacttgcccctcgtagctataccctggtattaattcaactgcgtaagtccagacatcttcatatattggatcagtatcttgctctccccatcttgatctattttgtaatccctctgttccttggtcacctctttgactacttcttaaaatactgcctctagtactggaagctcctacactagctgaagcacccactgctactggctgttctgtcactattacgcctcttaagtgtgctgaaggtcctgctgctactgaaggttgagtagtaactggttgcccttgatgacctacaagtatagaacgccttcttccacggctaatactttcttctattaggctttgcattcgcctatctattgcttctaaattctcacgcttctctttacttactataataccaccataataataagcagcaagcatagaaaaaaaataacaagctaaccctcccccactagtagcggctaacatcatagatgggtctgtaaattctgctatcacaccacctaatccaactccaaggccaccacaagcacctgcaattaggtttgtaatcaaacaacgagtcattcctatagaacaaatatttctacagcaattagactgaatagatgaggagttagtagttacgatatcttgattcccatgttcatctaaaaacatacaatataatgcgtcagggatagactctggtgagacactagtcacaccatcaccacctgtagctccaccttcaagtgattgtccaccacttagggaaatttcacttaaaggaatctgttcaccaccttcaccattattcatagcaaatggctctgccaacacactaaaaaataaaaaagagctgaatacacctgtcaaaacttttttataatatgctcttttttgctgtttatcgtaacatatatactttttatgcaacttacttgctaataaatagcagactataatacaacttattgtaacatatatatatataatattacataatgaaatgatgttattcattaaaatctatttcctttttattataaagttaatatatctaactatactaaaatagtaattagtgttcgataaaagtggtataaaattataaaatataataatatctatgtaatgagtagtagtgaagatgtattaaagatctagttaaaattagttaaagaaaaaatatgaggataagtaatgtatagataaaaaataggattataattataaagattagtaattagcttatcaataaagactgatactataaccatccttaagatggaaaagttcattattattgtcaaatttattctatataatctatagttaaagtatactattaaatataatagtttgttttgtaatagattatatagaaattatatattttaatatgttatgtttattttataaaaatacttactactataaaaaatttctattttaatatatgaatttaaaaaactacgtataaaataatattaatatacatattgtatacatgcacttagttgttgattatataatttttgttcttttgtaaaagaacataacattgttgctccagtagaaagactatctgtaatctttaatatgtatgtcgccccacactctgttcttaagtaattctcatttctcatcgggacagaaacttcatacctcttcataggtgctacaagcggttgtaaacttatattcgatgatgtttgagtccctgaaattcctgagatccacatttgtaagacagtatcctctgagagcttccaattacttcgcaatcctatacttttcccaaatatactctcattactttcactcagtttacatggaagaacccctcttttttcattataaggttcacatgttgccactgataacacaccttcaacatatggcgttactaaacaactctttgatatatataaattataaccaatttgaaccaaccctccagttatacttatagctggacttccacttgaggatgtttctctacctgcatgggtaaaaaatcgcttattctttactgttccccatccatagcaacttgcaaaatgtcctgtaattcctggacgatctgcattaaatgtaacaactgctgctatactttctatctctgactttgctttgacagaacctctacctacatctagttgcatccctgtatattctttcttttcatcattgtgacgactatatatcaaaccaaagtgtactccagtacataactcagcaattacacctgtttggcttgaacgtactttacattccagatttgccttataatcatctgtaaatgcaaatacatggtaaggaatatgactttgcttctgtttagcaggatcttttactacttttaataactgtccataactgggaacagatgatgaagatgctttattacctcgagtagacaggtacatttctggtattttttcataagctttcagcgcaagtcttcgtagcttttgaggaaactgtatagaaacacctgtcaaaacgcattgcatacccaaaagtgaacttacttgtccttcgtagctataccctggaataagattagtcgtataaaaacctatctcctcatatataggttcttcatcaccaccgccaccaccagtaccaccacctattgtctcatatatatgctcatcaccactttcttcgtcagacccttctgaagaactgccctcctctcctctttgctgttctacaggggtataactgcctcctacactagacatacttcctcgtggtggttgactggtaacaacaggactacctgtactatcagaagatcccacaggccttggttgagtagtaacagactgacttcttacattaaatgctacatatggtccctgttcttccctgatgttacttctaatagcacttaatactctaagtctaaccatcctattctcgatcctatctaaggtattcccttgtctagtacagtaaccacaaatacaacccagaggaccacaaactatacagccagccagaccataagcaataggagctgctgatactgaaaaaccagtagtagtaatagtagtagggatagcagttggggcgatattacctagttttgatactagttctatacaacaacctactcctcctccaactaaactacctattgatgatgatatgcaagtaaacatacagcaccatttctcaaatacagacttgcaacaacgcttagtaggaccaaaacaaggacaactaaaacttgaagatacatctgccagggtatctcctccgtgtgcattcaaaaatgcagcaaatagggcctcagattgaggatcagaagtaggctcttctccaccacttccatttcctgaacattcactatcataaggttggcctaagctatttctccttaacgaatgctgtctaccatcattttcaccattattcatagcaaatggctctcccagcacactaaaaaagaaaaaaaagctaaatactcctgtaaaaacctttttataaaaattattccttagttgcttattatagcctgtatttctttgctgactttttctaataaagaaataaaagatacatttaatatatatatatatcacagaactactctatttatcaaaacgttatgttttacttcattcttttctctactaaatacatatcttcttaaaataccacatattttagaaacgcatttcttataagaaatatttgtgtgatgttattattaaattattaagatgaggtaaattaaccgattacttaatagtatacttactaattaagtaaaaaatactctgttaaaaaaacagtcattttcttaagataactttgaaatgaggaagattaagtagagataaatatataactaaaaaagtattactgtaatcctaaaaccttaataactatcttattagtaagactattaaaataacatatatcaacttgtagttaaagtcaaatatagtataaaataacctacaacaaaataaacaaattactttcccatactcatttcaatcactatgtataaaaaatgttctatttaatatacataccgtaaggaaagaatcatctgttggcctccaaattttttggaattttcaaaacgtatcacactatttataccaaactccagattatttgttaaatttgctgtatatgatatccctaactctgtccttttgtaactactttcatttttaggcactgatactttatatcttgaggcatgtttctgtattggctcacattttatgctatttgtttcaatatatcctgacacgcctgctatccaaatctgtatttgagacatacttgttgcttgccaatgacttcttaaacctatacttttctctattacttgttccttgttctcactcagtttacaggggagtggtcctgatacttctttataagggacccatttcaccaatgagaacactgtctctacgtaagatgtaattactacatgctttgaaactaacacattgtatcctacctgtattagttcaccagcaaagcgtatattaggtaatcctttagtatttacttctctattagcatgggtgaatgaacgtatattcttaaccttaccccaaccataagaactaattagctgacctgtaaagcctgcattatttgtatttgcaacaatgactgctgatagagcttctgtatctgtctttgtctttacctctcctgatcctttttctaaaagaatgcctttatattctcttgtatcacccttatgacaatcatatgtaagaccacaactaagaccagatattacatcaatcaacactccagcttggcctgaacgaactttgtgttctaggtttgttttatagctatcaatattggcaaaaatattaaaaatactcaaacctaatgtttttatttgagtctcttcttgaatgtgttttactggaccttgaaacttctgtatctttgagtaaaaactcccctctagctgagtctctggtgtacaaacattctcctgtgcctttaatcctaataattttagcatagttgaaatttgttcagaagtactaaataatgcctgttgtattcctataagagaactcatatggcttgcctcactatatcctgggatagaagcagggcatgaaactatccgtacaggttttagttgtggtacaacctctgaagtgtacttcccaccagtatactcctcctgtgatgtagcactttcctcttcaaaaacgtcagggtactcatagggatcccaaaactttcctggaggaggaaccattttataaactccaccttgtatataccaatcttcatcattttcatcccaaatacctaagtcaaatccactctctcttataaaaaaagaagcattcctaagctccgcagcaacaagctgtattctttctatttgctctctatctctattaggatcttcatcctttcttttttcaatatcatcaagcaactgtatcatctttacattttgtaagtttacccatgcctgatctcctctttgtttttctttctgcctttccagctttatcttttgtagttcttcttttttactgagtattcccaacacacaactacctgctgtagcaagacctaaagataaacaagctacacgactgcttgttcctaaccctctactgactgcacctattgcgcttagagtaaaacctgtagtaagtgttgttattcctacagaacttcctaacacaccaccacatgttactttagctttttcccaatttctttttaaaaaagaactaatagataaagatggtgtattagaaagacctttttcactattatgcattgcaactacttcataagtgctacaaaaaataaaaataaaaatatagtaactattataatacatttattacaatacattttttttcattgtaactacttaaaaaatttaattaatataattatacataatttagaaaaaagactaaaataaaatcttatggaacaagatagttattttactatgttgttccataaaaattataaataataaatttttatttattaaaaattataatgacataaatttattaaacaatatattattgttagataatattcattattattttcataaaaataggttttctataataatagtaatttatattttgtcaaagaaaatatttatatatgtaatcatctatattatagaaataagatctttaataaattaaagataaaaattattttgtataaaaataaaaaaagatatacattttatatgtaaaaaatttattactatagaatatataataaaaaataaactatagatatgctataagtaatttctattaacaattactctataataatagtagtaacgataggataacatactgtattaatttagataatgatgtattatccataaacaatatattagtaattataagtaaaaaagagttttagctgtttttctttactcttttttatattttcaaaagacatcataccattcatttccaaacaaaacctaggtgtaatatttattaaatatgataatccaacatctgtttttttatatcttgtctgttttaaagggactgaaatctcttgttttagacgtgagttaactatgttacagcttaacctcttcacatcacgatagcctgaaacagcagctatccataattgtacctgtaacatatctgatggtttccagtaactacatatacctatacttttttctattacttgttctttatttttagtcagttcacaagaaaaaagacttaatgattctttataagggccacactgtacaactgaacatgttgtctctatatatggagtaaatcttacttgttttgatacagaaaggttataccccaattgtactaaccctcctgctatacgtatatctggagagccttttgaacatacttccatagtgccatgcataaatgaacgtatattctttgctttaccccatccataacaacttacaagatgtcctgtaatacctgttctccctatattaaaagctaggccagttgataagctctctgtatttgtcctaacttttatcatctctgtccaagaattatttgggataccactatacatttccccatgattattatggcgcctatacactaatcctagatatacacctgatgtcatatccacaactatccctgcttgaccagaacctaatctatgctcaaaattagtctcataactatcaaatgtaacaaaatgatgaacatatctttttaagaatagactatcagttactttagctacacatgacggatattgaaacttttgaccttttgaataaacatatccttcttgttggtacatcatttccgacataagcatatgttcatgtgtttttaacaccacttgccttaaagcacttgctgtctgttcagatatatccaataatgcagactgcatccctagtaatgaacgtatatggcttttaggattaaactccgaaagaaacccactatagtaagaagaagctgtatctctagagtctggttgtcttgttattacagcaggatttgaaatacctatagagcttggttgagttgtaattacacgtaatgctatctgagaactagtttcattttcatcttcactatctgagctctgctctccatctgtattttctgttctatgattacaggtagtttgataacacttcatacatccaatagatgtagcagaaactgctgctgctaacgtacacccagctccacaacctactaaacctgcatatgttggtgaaggcaactgtgtacatgtaatttttaatgcccaatatagttcactctctaacttttttgtagcaatacaactagtaacacctgatgcagctccacaaatagcactctctgcagcaataatagcacaactacacatcccttctgaacatcttccacatctacgcttcatcctagcacaacacccttcccctctagggttcactccaactctttgaacactatgtgatgactgtagtagtggtgttctttcattaactggagaagggctatgttcattattgttattcataccgactgcttcagtaacacaaaaaaatatacaaaatggaataatagcattgacagctatcttcctataattaccttttattttttgtataacttgaaacattatttgtaaaaacaataaaggatgactattataggctcgtaacatacattttatactatgaactattttaatatatatgaaattatataaattaaataagatagtattcattatttagttagttggatgcatttatccatacataacctactttattcctttagtttatagtcaaacaattatctatttttataaacataatagtaataacatattaaaaaaacatattttctttaacttctcaatgggtcatactctataaatgtaatattctttaacttctcaataataaaaatgagttatcccatacaaatgaattcaggctctgactatagtcaaagcctgaaaagattatcccatcaaaatgggcaaattaccctagtttataaaggtcagatagggattaatacctatattgtgcctgaagtgcaagatattggctatcaatctttttagcttgcttaaaacgaagtataccattacatccgatttctaacatatctgtgatattgactacgtaagataaccccacttcagtccttgtatattgtttcttatttacaggaacagctgccttgtaagatggcatagaagtcgctaatggtctactatgtagtccactctttttatgagaacctgaaatcccagctacccatgtttgcagttgtgagccacttgttacttcccagtgactacgtaaacctatacttttttctattatttgttctttattaccacttatttcacatgggagaatccctgataattcttgatatgcatcccacttaaccatagtatacatatactctacgtaaggagtaagtgtcacagattttgctatagggatattatagcctacttgacctaccagccctgttaaactcatatctggtttacctttagatgttgtttcactatagccatgtgtaacagaacgattattttgcattttcccccaaccataataactagcaatatgaccagtaaaaccttttgtttcaggatttaaagctacgactgcagataatgcttcagtctttgacctagactgcacaatacctgagcctgtatttaactgaatccctccatactccttacgtgtgtcagtatgacggttatatgctaagccaacacttataccaggaaatagttcagtaactactcctgcagaccctgaacgtaccttaaattccaagtttgactgataattatccatagatgcaaataccctgtaagaaataaagctaggcttataattcttaaaagtacttataaaaccccttgatggtccagagagccacttcttctgtaaaggaaaataattatcttccatgttgcccatagattcttgggaatattcatgtgctttcagtgttaacgctttcagattcatcaaaacatgttcagacgaactagctaaaatacactgcatacctagtaacgaacttgtttgtccatctctattatatcctggtaaaaaacatgatgaagttctattaccactacctctatggctatcagtttggtgagaaccaaaaggtctttgggatggagctaacaaaggacattcacatgatcctgaacattcgcataaattagcttccctcgtattatcacctaaggtaatataaaatggtattccgtcctctggagttggattctcatgtacacatgaagatctcttagaacaataatatatacctaatccggcacaaaaaccaacaaaacaaccacctatagtacctgtaactacagcacctactcgctcacttgaatgagggaaagtaaacatattactaaataaaacacctgcgacagtacctaacactccacctataatacaccctactgtaagataagggcaaggatttccccgtctacacatattcctaaacattgaactagaactaatcgaaggagtagaactttcactatcagaattagtcaaaggattaaaaccattatttctagaaaaaccaggcatagcaaatgcgttaactgatgttactaataaaaaaaacggaagaattgttactgcaacacttttccgtaatatattttttattatacatttattataaaactcttgttgtttaaatatatacctatagttacccattaacctttctataccttctttaagcatgttatatatatatataattttatatgtatatataaaatattcctttatcatagataagcttccttttatatgtatagatactttttatattgtatcttattgtatatatatatattgtttttataaaaacaaatttctatatattaatatgttaatagaacttatattatttataatataaatataatttctatatattttatatgtatagaatatacataaatattgtttacacatttaatgtaaacaatattttttcattatgtgattaaaatacaaaagatatagatactttttattatgtattatataatttgaagattaatagataattcaaaaagaaaaactaatgtgtatataaacattatgaagaaaagaaacactaattaataatattataaatgtatatagataatagttaaattaaatacatataaaatatttttttactatataattttaaaataaataatattaattaattagtaatgtatttcaatatattaaataataaacaaattttaaaaatgatgtttatatataaaaaactacattaataatttaatattaatgtagtctagtatttaataagtatttatgatctaaagttctacaataaaaaaatagaacggcctaactattacaattaggccgttttagtccacctcttcagtatcaactccatcttgatactgatacactatgtattccaaatatagtatcaatatttatattgcatttgaacatcaaatttttgtctctcaagcttttttactttatcaaaatgcattaatccatttactccaacttcaagtctttttgtaagctttgctgtataagaaagcacaacttctgttctcatatattgtctttttttttgatggaatagaaacactatactcatctattgaagccataagaggtttagcgttcaatccaaaggctacctttctcatagcagttttcactaattaaaattttatattggaaggatgggatatttagcggcagaaaatctaaaacttgctgaaagtaaagttggactatagatatggctaactggctaactatattaaaaaaatacatagccacactagccaaccttgtccttataaagaacaaaaggttattttttagaagtaaaaaagaagtgttatttttttatttgtataggctataatacgatatttcggtgggaatacgtgtagttataatatgtagcaattaataatatgagatattctaataaggagtacttattaatataagtaacgtttatctatataataatatttaataaactatcatatagtgatttattaaaaatactacctatactgcttgaataaataccgtttgtataaccagtcaaaaatataatagtaatgatatatgtattgtcaattaacatactaagtctttagtacaaatagtagattaatagataaggataaaatctatattctgttaaaaaatacagtcagatatataacaatatataaaagttatttatatattaaaaaatatactgcaatttctaatagataaaaaatgtaagattatgtgtctatgtatagtttaataaataaaaaatagtataataaaaacctattataaaaattaataaaaataagtccattgaaggtttatattctgttctgtgtatctttttgtattcatgatatgagttaagccagatagattcatctccagcctttcagacaacttcattgaatacacaaaaccacattcaaatcttgtatagtttcttttataccctgggacagatgctttatatttatccgttagagctataattggcttactacttatactatttgtatgctgtgttcctaaaacagctgacatccatgtttgtagctgagaagtgtttgttgtcttccaatgactacgtatccctatccttttttccaccttacgttcagtattcctacttacttcacatggcagcaatcctgaaaattctttaaatgcattccaaccaacagttgaagccataagttctatatatggcgtgacggataaggtattgctttgaaaaatagtatatcctacctgtaacaatcctcccatcaaatatgcttctgggttacctttaacatgcaactcaccatccatatgggtaaacgaacgtgtattctttatacttccccatccataaaagctaactatatgaccagtaataccttttttatttggattccaaaccatcattgctgaaatagcttctaattctgttttagcttttgaagaacctatccctgagcctagccttacttcaccatatttcttcatttcattagcctgatgatagtatgataatccaatacacatgtctgaacagctatctataatgattccggcctgacctaaacgtgttttatattctaagtttgtcttatatccttctacagtaaaaaatgtacgatacaaaggaaaatgtactttttcttttttactaaatgttggatacaacctatgcaaccgcttcctacctgtcaaaaacactaacgcattctttctattaagagagaaattatctatctcatcatcagaaaactcatatgctttcaagggtaatgtttttagtatgatagatacttggtcggaaatatctagcaggattccctgcataccaatcaatgaacttatatggccacctaaattatacccaggaataaaatctgctttaactttacatgctgattgccccatcagcttcaaagatgaatacttcacttctgatgactgctgaccaccatcagttgtactatccttagctccttctttatttccttgagtagataagactatacctctggctggtgcttcagattcatcttgtaaacctgctgttgacagatcttcaactgcatcaaaaaattcttcatcacaactttcatactcatcgctactgctattactatcctcatcacttgaactatctacatgagttaaatcatcttcatcatcagattgttgttgaaacatacctaatgctctttggtctgcagctgtccataaacaaaacctttgtttccatgttttctttctttcaagatacccttttaaagcattattattaagttgctgacgacaactctctaacattactatctttttttgtgtttgttcaatggatttttgtagtttttttacttctgcttttgcatcaatttcacaatgccaacaaaaaccactggctatccaagtattttttctgcaatcctcagaaaaggtacaacgttctttatagaaccttctcttatatttgtccccatgatgagctctatcctgccaaaacaaaaaagaattacgccatgctcttcctgaagagctattccaataacgttgttgctctctccagtaagtaatctgactttctaaaattaaaatttctttatggaaaaaatttatttgactccttaaccacttcatatttgccttacaacattgtctttcttcttcccagatttgtaagtctttttctacactattccttagaatactatacatattagggatagataaccagcaacattgattactactaaaactacttctaaaccttaagtctaaaccaacctgcttatgcatagctaatgatatttcaacgctatcaactaataaaatgtaaagaaagagaaaaaaaactttcattacttgttgtatacatatcgtttgttgcattaattttttcaaaaatgaatacctatataaaaactataattatatctttgtatactcaactatactataatattaaaataatatataataaaaaataagtaataattattataataactatatataattatattttatatataaaaactatatatatatatattacatacaatatattaatattgtatatatatatatagttattaattattaactaatagtaattaataactatatataataaaataagaggataatactagtattatcctcttataacagagtgtattaattaactattaatacaactaaatatatattaatttactatgatatatactaactacataatgtagtaatctatttgtaataagtatatttattccatttatatctatttcttttcaataagctgaatcaataatgataacgtatctgtgctcctgtatacatattataaacactattatgatataaatgtataatcatatgtgctcctatagtacatctagaggtaagctttgactcatgaatcattccaatttcagttccactatactctttcttataagaagggatagaaacactatatctaatattaggtattcctaaaagtgtagatttaaattctgcaaaatgatactgtccagatacatatgaaatccatccttgtagttgagaattttgacttactttgtactgactacgtaaaccaatacttttttcctgtgtttgttcattatttctagtaaacttcgaaggtaatatccctgtatactcttgataacctgcacatctaatagatgaaaacatatactcaacataaggaatacatactatttctgatgaaagttgtagattataccctagttgaataagtcctgctattgattgtatctctgatgtacctttagtcttgaccatacaatcagcatggggaacagagcgtatatttgttacagtaccccaaccatagtatgttacaatatgtcctataaaaccatttttctttgtgttccatgcaacaactgctgaaagactgtctaacttctttcttgtgctcactgagctactctttaaatctccctgcatcccatttgtcttctggactctatcgttatgacgaccataaataaatccagcagtcagtgtaggccaaagatcaaaaagaactcccatctgccctgaggctgctttatattccatatttgaacagtaactatctaatgatgtagttattctataagggatgttattagttattccagaaaaaatatgctttgactttttagaagctaaacgccgaaaatgtgacccaaatctagtatgctcattagctgttatattagaactacatgctttcatgcctaacatttttactgtagtggaaatacgtttagacgtatctagcaacatatgttgtattccaaataaagaacaaacttgtcccttatagttatatcctggaagcaaaaatgctgtagttttatctacaccaagcaacttatttttttctgtgttactacattgttgtgtctgtgttatagtagaatgattcttttcacttgatgatccctcacttgatctactatctgtatgactatcgcatttgcctagcacagaattaggcgaggctaaacacaacctatcctttttatagagttccttccaataatggcctacacaacaaataacacacccaacacctgctccaacactgcagccacaagtcccgcaagcactgtataaacccacatttgaacttattccaagacaactacaaatccaatcaataccacaaccaatggctcctccagctgttgccccaacacaaactgcttttactgtatctaaacatgcatgattttcagaaaatccttttggctgagtaactaccactgtatctatactacttgtactactatttactccatcaaactctgataatatacaaggacgacggcttatcccatcatgagtataagaaaaagaggaattatcttcctcaccagaatcgctactatatggagagtctgaaccaagatactgagaatcccctaacgataaatctgacgatggagagtctgaaccaagatactgagaatcccctaacgataaatctgaaccaagatcctgagaatctcctaacgataaatctactaatgatggagggggtggggaaggattatggccatcatcaaaacttgattctgaactaagatcctgaaaacttcctaacaatgaacctgatgatgaagagtctgagccaagatcctgagaatctcctaacgataaatctactaatgatggagggggtggggaaggattatggccatcatcaaaacttgattctgaactaagatcctgaaaacttcctaacaatgaacctgatgatgaagagtctgaaccaagatcctgagaatctcctaacgataaatctactaatgatggagggggtggggaaggattatggccatcatcaaaacttgattctgaactaagatcctgaaaacttcctaacaatgaacctgatgatgaagagtctgagccaagatcctgagaatctcctaacgataaatctactaatgatggagggggtggggaaggattatggccatcatcaaaacttgattctgaactaagatcctgaaaacttcctaacaatgaacctgatgatgaagagtctgagccaagatcctgagaatctcctaacgataaatctactaatgatggagggggtggggaaggattatggccatcatcaaaacttgattctgaactaagatcctgaaaacttcctaacaatgaacctgatgatgaagagtctgagccaagatcctgagaatctcctaacgataaatctactaatgatggagggggtggggaaggattatggccatcatcaaaacttgattctgaactaagatcctgaaaacttcctaacaatgaacctgatgatgaagagtctgaaccaagatcctgagaatctcctaacgataaatctactaatgatggagggggtggggaaggattatggccatcatcaaaacttgattctgaactaagatcctgaaaacttcctaacaatgaacctgatgatgaagagtctgagccaagatcctgagaatctcctaacgataaatctactaatgatggagggggtggggaaggattatggccatcatcaaaacttgattctgaactaagatcctgaaaacttcctaacaatgaacctgatgatgaagagtctgagccaagatcctgagaatctcctaacgataaatctactaatgatggagggggtggggagggagaattataaccccttttaatactagaaatagagaaggcttctccagctgtcaaatatacacataaaaaagaggaaaaaatgataaacactttatttctagaaaaaacttttatgctatattgaactagccaactataaaatccatacatatcccatgttaaactcttaatacaataagtttcatacatatacatatgagtatatcttctacaaaagaataaaaaaataagaataaagtatataaatatcgttaacataatataaaactaccttagtagattattgtattaataatatacaatataatagttaaataaaaaatataaaggacttaaagacaataataatagatgaatgtaatataaaatactttatagaataatataaaagataagatataaacaaacaaactatgttacattgtcaaaaatcaaaataaaatatcactaattttttataacactttataatatataaattcctcattaagttatagatttataatatctaatagttaaacaaaatagataaataatttaaaagcaataataataataataataataatagatataagaggatgtagaataccttatagaataaggtaaaagataagatgtaaaaaactaaattatactacactatcaaaaatcaaaaataaaataccactagtttttacaacattccctatgaaaactctcacaatatattctattaaaatgtatagcgtaattgaaaaaaaacatgttgccccccatagtttttttgtacttttttaatatatgatgttccatttacataaaaatgggcagtctctgttaaagcagtttgataggataatccaaactctgcctgtagatactgttccttttggacaggaaaagataccgtatacatatattggttaggtataactgatagagtagaatacactccttttgtcttttgcattccagaagtacctgcaatccatatttgaagacacgttaaaggagtcggcttccaattactacataagccaatacgtttttcatgaataatcttcatatcatcagtaaatgaacatggtaataatcctagcttttcttgatagccacctctttgtaccattgaaaccatatattcaatatatggcgtcatagatacaccatgtcgtatgtctataggatatcctatgtggataagtccacctacagaactaatacttgacgatccttttgtatgtacttcttttcctccacgtgaaaatcttcgtatattctttgccttaccccaaccatagcaagttgaaagacttcccataatacctactttatctaaatcaaacatcaccatcgtggagaaactatctacatctaatgtagtacctaatattcctaatgctgacgaaacgtttcctttatactctttaactttccctttttgatgaccatacacaattcctaacgatacattagaagtaatatctactatacaacctacttgttctggagatatcttatcttcaatactatacttctgactatctatactaccattggcttgatacaattttaatgcttgaaaaacattaaaatgtcgcatgctacttccagaagtactgaaatacttcatctgctttactggctttcttgtaagacgtgcacccctattgtatgttagggcatatgcttcacctgtattaagtctctcctgatatccttttaaaactaagtcccttaatgtcatagatagttgtgtagacacatctaaaagtacatgtcgcatactggctaatgcattacgttgatcttgataattatagcctgaactaataaaaacactttctttaataggaccagatgatgaagaaaaaattttacttccacttgaacaacgtgaagaacttccctgttggcctaatggattaggaggggttatcacaggagtactaacaaagttaccttcctcataacatgatttctctctttgacattctccagttgaagaatcttcttctgaaaataatgaagaaattagattcccaacccattgaaatactatacatcctgatgtaagaactgtttcaaaactagaacattgagcatgacacccttctgaaaagaaacttctcattgtcccataaaattctaaagggtgacaaaatggattaggacaactttcagaatacatctcactagatatcgtaggacaacatcctgtattttcctcttcttctgttttctcaaaatcttctgttattataaaaaactctggacttgtattaggatgagcaactgctggattttctaacacactttgtgcatttgatacaccacattcttcattattatacatagcaaaaacatcttcaacacaaaaacatatatacaatataaaagaaaagcattgtattattttttttacattacttatagtaatccaaaataacttaaaaagcatataataccttctatcaatactctaaacatagagaactataaaaactattctaaaagaattatgttatgattttattatttaaataagatttttataaagaaagaataaaagataaggacttcatacaataaaaaataaatatattatttattataagatcctaatataaattaaaatagcctattataattaatattaatatatagatatattgtgtaacaattgctacaacatgtttatataattaatataattgtgtgatactgattttaataaatagagaggttctattcacctaataaatattcataacaagatagacactatatacttcaaggttgtatttatattataaaaaatatataacgtcaaacactattataaaaaatagtaaattattataaaaaatagtaaattattataaaaaatagtaaattttttcttaatctattgttctaaatgaatattttatataatacctatactatatcttaataatataaagcaactatctatcttttatataaaattaataaaagatagatagttgctacaatatatacatatataactatttgtagctataaaatagtatgtattaattatcttattgtatatattttcttattacttcaatacgtatattgtacttgagcgactatattctgattatcaactttactccatttattaagacgaaaaagcccactcagactaacgcttacattatctgaaaatgtaccatcataagagactcccagctctgttctaatatactggtacttcttagcataggtagaaaggttatgtctgtaataagaagacaagtatgaagaagatatcaaactatttgttttactatatccagatatacctgcaacccaaagttgcattgaagaattcattgatacccctatgtcactccgtaggcctatacttttttctaatatctgctctttatttttcccaaacttacaagcacctggagaatactgctctttatatgaactccaactgacactagaaaacatacattcaacataaggaaccaatgtcacttgattcaataaaaaaaaattatatcctagttgtactaatccacccagaagattaaccttaggagagcctttagtaataatctcttgccccttatgaataatctttcgagtattctttactttcccccaattataagaacttactaaatgacctgttacccctgcatttgctgggttcaaagcaacaatagcagaaaggccttctgtttccattttagacttcactgaacctattgttgaacctagttgtatccctttatattcttttgattcttttttattggagtcataagcaaaaccacaagttaaacctggagagaagtctaaaagaacacctatctggccagagcatacttttcttttatgtatatcctgaggttttatagatgaaaaaaaacgatagggtaaaaaggatggcacatctattgttgtagatagtgaacctctttttcttttgacagatactactttccccttgtctttattgatataattctttttaaaaaaagagaagtcctgggatttagagctatcagaataattttttaaaagcaacatccgtaatgtagtcaatacttgttcagaaccattactcaataaacactgcatgctatgtaatgagctcatttgtcctaataatgatgcttctgcagttagatagcttgagcttcgacctctacctcctggttgactaacaactggactacctggacttgctggttgatgaacagttacaggagggaaacttacagaaggaccttcatctggggactctggctctctatgttgatgagttccagtagaaccatacattgttgtacttccctctcctccagtccttatagagttactagtactatgatcctcccaccccatccatctgttataaccacacaaataacatgctaatgaaactccagcaccaacacatgcaccacctacagaacttaagacccacccagctggtccacataatgaactcatacttgggttcataactgccagcatagaataccctattgcaccactaccacaaccacatgcagttcctgcctctgctgcacttacttcaggatatgtagattgtggttgtgaatatgatgggtaagaataatagccattagctccagaggaagaagaacttgttgaggaagaacttgttgttgacgttgaacttaataaaggttgacgctcttcttcacttccattcatagaaaaagattcattactataaaaaagaatacaaaaacatactaatgtcgctacaataagaaaccttttaactgtgcttaacagctgtataggaaagtataaaaataaacgtttgccatactgatagttacttttaaaataaaaatatagtttgctaataactactgtataaatatatattattttatatatattccacatagttagtgagtagtttttcattttttatccttttattaactacttattctatagtatgaatattaaacatttatatagtagaagataattatacttaataatattacctactcccttactatatatatatataactaaaatatattttatattttatatattctttaatcaatattttttcacaaaagaaaaataaagtattattttatataattaaaaaaaatgcaatacaaattttgtactgcattttttataattataaaatttaattgtataaagtttatttatattttattaaatatataatacaaatatagtatatacatataataaaattatatacttatataaagtatttttttctacatttaaaatatgtatatttagatttgatataaaaattaatataaatttatacaaataattataattaagatattattgtatacttatgatagaaaaatattaatattttattatttataaatataatctatactttaatataaacatattaatattcatatattagaattatatatcaaaatatacatattaaatatatattaattataatatattaatatatatatataatatttttatagactttttaatatttaataactttttaattaatgtattattaaatactatagttatataatacaaatatttttttcatattagaacataattgtgtgctatacatatagtataataaatatgaatttattatatattactctatttgtataaactgctatcccatctactggtgtgtgtatgtataaatttatttttctgtaccaacttattactattgtaaaatagaatattgtaattcatcatgtatatcatataaaagtgttttttgcctttgtttactctctacttgatgaatcaaatattccaaatcaacattgcataaccttaaatagttttgtcttcgaatatgaagatattctccttcgtgttgtctatgttctttttgcacgttatctacttctaccattggctgctctattcttatgttgttctcttgatattctttatttttatcttccatctctttactctcttcttctcttctatttatttcctcccttatttgctccttttctatccttcttttttgacgctcttcatcttcatttttttcttcaggaaaacctggtaattcaatagtaagagggttaccaacagttacggtttccaaacacttttttatagtcgttatatcctgtttaaaaattaaaagttgtgcctgtctttcttgtagtgaacacaagctagtagcaatattcgttgaaaaagatgggttatggatatatgataaatatgctaaagggatagtagtcaaaacggacctcgttataaaaatagtattagactgaagtaaaattgtgtgtgtgtgtgtgtgtgtgtgtgtgtgtgtgtgtggtctcagggctatgactgtagaattatactatctaacgtcgttatctataattataaatacaaaaataatagtctatcattaataatctggcattaacctaagaatagtaaccctttaaaaaacatatttttttagatagggataaatacatttagactagtatgtagtaaatattaaagatacctattagctatattgatgtatgttgttatcgttaaacaacacaagtaaggaaggatataaataacctaacaactctagataaaacatatagcaaaagaatatctaatttattagaattgttctttaaaatgataatagtcacaaaaaaatagaagtcaaattttatcttaacatgtagttcttacaataaaaaatatcaattttacagatataaacactactttttatcatttatataataactattagtattcacataatatatatataatttgtcataactaaatacaacattatactctaaacaaaaacatatccattgttttttagaagctacaatagctaaatctattatcacctattttgaaagaacatccccatatctattagctataactaaaaataaatgtttttcacctcacaagttatttgataatgcgcccttttagctattcatatttgtataaaaacctttcactctctagtgacaatattgtccaaaaacttctttaattacattctttttatcactaaccgtatagtgtatgtaatagttaatacatatttacctattaataatacatagatataacatatacgttcataatagaactatctattacagttaatgataactaatgacaatcaataactatttttatctgtaaaaaagatgacatttatcagtcgtcaaaataaccactcttcaaatataatcatttgatttatttaattaaatttaaaaaaactaaaatacactaataaataatgacacctaataatacctgatgcaccaatagatataactaaggatacttccataagtgttgttttaataaaaaacagaacaaactatttcctttagtcattaggaaatagaaggattaaatactgacattgttcgtcaaaataaccactaagacataataacttattaaaataatttattttattgaattttgatatgcaaaaatgtatatctattctttctctttatgaataaaaaagtttgctctatttttaaagttaatgatacgttaataaagataatgtattacttagtcatctattgacagttagttattataactagttgtttttaagagcaataaggtgtcattaacagataattacagacgaattttaccatctgattcataatatatgaaaaatattactataacacttagtatatatactgacatccttcggcaaaatgtccacctttttacatatcaaaaaatcgtcatagacgattaatatctaactagttttatcaataattttttattaaaaaaaattaatacaactagatatagctaatgatagtatgctattattactaactgtcattaattgtaaccagactagtattaacagtaatgagccatcataattacttgtgttgtgatgatattctcttcttagaaggtaatgcttctgctgttctatttaataatacaaggtttgtacgtgaaagaagacttgtagattcaagaacctttttttcaacaagctctgcaatagcctctcgaatctgtcgacgtgtctcttttaaaggaacatgaggatccatattcaacgctaaagctaatgtcataatattaccacgaaagacaggattatctctatgagactgacaaaaacgatacattgccttagcaatactacccctaatttggaaacgctttgtaatattgatccatgtaagactattcgccaaatacatttgatagaaaaaaggatttacagtgacagaaatttctctatcttttggtcgaagacgtaagttagaaataatttgagaaagatcatattggaggtcttcacctttttcacgtacaaaaagctgcatcgatcctaaggctaaactctttaagctggtaataagcttctcataatgatttgctcctggccgcttatgacccataagacgtaaaataggaagaacaggacctctatatgtaaatgaaagaggaagtgtattcttactattaccaatcaatgttgctgtttgttctggcgaaagtttagctggtgggagatcatccacaagctgctccatatcatcatcattttgtctttgagttttacgagttggtgtccgatctaactttcccatctcaataatagctaatagagccataagagcatcctcttcttctatactcaactttggccctgtatatatgatttcaccccatggacctgaagaaacaagctcattaatgagatagcaagatgactctacaatttttgacttatcctgaatagatgcctttaaattctttacaataatatctcttcgtcctttttctttattattcatagggaaaaaaggagaaacacgagaaatacttgtaggatatccacaccaaactaagagatttccttgttcagggggtgtttttttaacaatagtcgcaacagctttggtggtttctctcccctgagcttctgctactgataacatagattgaggtgcttcaactggtgttctacctatatctgctaatgtaggacatcctgaagccttccagttacgaataacagcttcaagtagtggagggagctctgtatggtgctcctgacaagattcatattgaacagccaaaatagtattatatgatcgtaatgcttcaagctctacttgggaaagatgtagtgaagatgcgctaatctgttgactatttttagtactcttcttttgtaatgctagaggagattcctctttttttgccatctctaacctcacctttcattactaaaaacatgttctacattcatcaaggaacataactatctcgtcaaagaaaaaatgctctaaaaagaactcatttactattatctccgatctaatccttactctattagctatattcaactatctacactagataagtagcaacgatttttatatatagctacaactaattctggcctgttagatatcttttcaaaaaaagtttacataaagaaagatatatctttctactatatagaaaatactttcttctattccccctctatcttaacattatatattatatatattcctttttattctaaggatacttctatacttaatagatatcttaaaaaaaaaaaatatctatacccagacaatatatagcttattacgttctcatattcaagctatctaacaacattttcttctggtaattcttgactttttttatctatcatgtgagaaatacatttatactgttcagctacggagacattaatgctcgctaaagttattgcctttgcaaatcataagggtggtgttggtaaaacagcaagtgctgtaaatgttgcttactgtcttacaaaacgtaaacgtcgtgtccttgttgtagactgtgatcctcagggaaatgcatcacttacactaggaacaatctcaccctatgaacaaccacgaactgtggctaacctttttacaggtctttctttctctacagctgcagtaagctcaaaatatgaaaatttagatattatccctgcaaatcttaacgtatatgcaacagtaggaacgctatctaattctatcaaacgattttttggctttcgacaagcattggatgaagcagcacttaaagaatacgactatattatccttgactgcccaccaactattgaggggacacttctcacaaatgcacttgttatcaccgactatgtgatcattcctgtaggtgtcgaagacacatatgcattatctggtgtaagccatcttattaaagtagctgagacacttcgtgcagatacagaatcaaatcttgcaattatgggtgtcttactaacaatgtttgatggacgaaataatgctgcaaaaactatcagaagtgttgcaattggaacatttggcgaagatatggtttttcaaacaacaattccccgaaatacaacactaaacaaagctgtcatgagtaatcgagcagtatgtgactatgatgacagttgctcatcatgcagaagctacagagaattgacacaagaaattgaagttcgactaaaaaatccacatgccctcattacagacacacatccattagaatcagagtaggataatacaccatggcaaaaaatcaactggatgactttgcagcaacacttaccgcacaattaaaagatgctgctgaacaaatgcgtaatatgaggactcctccagagcatccacaaaatgaacaaatagactctacaacaactaaaaaaaatcgctctattcctaaaaaacataaaaataccatacaactagtaacagatacgaaacaattgacaaaaaaagtatctaacaaaaaagaacaaacgcaacagacttcccaaaagcagcctgcaaaaccaaaagatggccaaatagctcctactcaaaaagagccatctatcaatgtatccatatcaatttctccggaagaacaatcaaccaacagtatagatcaaactgtactatacagccatcaactgtcatcaattgacactactgattctagtcagctgctacagtctaaaaacaatcaacaaaaatatagtaataatctattagcagatccagaaagtgttgatataccctctactaaactatcaacaacagtcatcgatcagtcatcagacagtcatcaacaaacattagtagacaacaataatttaatggcagctaatgacagcccattatctgtactcccatctgaatccctacaatatacccagccttcaaagagcatgctttttgaaacggatatattacaagaaaatatatctcatcaagatattccttcacctgaagacaaccatatcaatacttcttttataggtacacctactacatctactcagccattaatagataatgatagtttaaaacagacaatgacagcttgtgacacaaaaaaacaatcacaatctatcccttggggtcatttttcttctgatgcactcagtactgttcaaattaataccgcaactattggtggagcaagacaaattgtattagatgcccttacacaactaaagcaagaattttctcatgtaacaataaaccttaaacgtcttgccactgttcttggactctcttatgggacagtgcgaaataccattagcagacttgtaagagaaggagttatttatacaactcaaatccgtactggtgatgcacatggtgtatatatagaatttgctgatgggtcttctttattaccgtcagtgacagtcactcaaccaacctatgcacaacatataccttctcatcaaccttctacttctcaacagacatcaacaatacacacaaatcctatttgggatgttgattctgatatgcttagtatgctctggccatatgcttttgcagcaggattaaaacgcatccacttagaacatcttaggaaagcatttcaaattcaacagtttgatgatgcacatgttgcatgttaccttcgttatcttaactggaagatagaaaaagaagctcaagatgaaaatcaagcaacagccatccttcagcaatggatacaaaccatgcagcaacagggcaaatatccacgtccaacagattacgatgaaccagaaggcttagaatagtccatttttactatatttttacttattatctctattatttttatttttttaataaagatatttttgaggtattatttattagtaatagataacatgatgtcttttctttttctttttttgttttccttaagatccttagagtagtttgtgagtcctacatatataaaggttttatatctatctaagtggatattttaccgttattaagtgggcattttaacgaaaaatagtgattgttttgtcgttaatgagtgattattttaccgaaaggtggacattttgccgaatagcttataagttaaaacatatcatctactttttattatagataatatgttgagagaattattattgtaatatcccttgtttttttacataagtttttctaagttagatagtttttctacgaaatagatatatagtccataaacatataccagggcaagtaagccctggtatatgttgtgataacaaatagatatatcctaattgtatatgttacatactagtatgtatattggatatatgtatttatttgctgtccttcaaaacgttttgttttttcaagacgtacggatgtgtttataccaatattaatagtatctataatgtttgcttcataagaaagacccaactctgttcttacataacgttttttatatgtaggaatggatgccttatacctatcaatttgtgcaattaatggttttgaatggataccttctaaagtacgtttcccagagatagcggaaacccatgattgaagttgactgtttgttgttactttccattgattacgaagaccaatactttgttccataacatattctttattttgactgattttgcaaggaagcggaccagttttttcgctataagaactccatgatactgttgagatcatgtactctatgtatggtgtaaaggagaagcgttttgtaataggaaggttatagcctaattggaaaaggcctccacctaaactgatatctggttttcctttagccccgacctctgagtctccgtgtgtaaagtaacgatttgtttttactttaccccatccataacaacttgcaagatgtcctgtgaagccaaatttgtctgtattccaactaataacagctgaaagactatctgttgttgtttgtgcttttacagaaccacttgctgttccaaagcgcatacctatatgttcttttgctacttctttattacgattataagccaatccgagtcgtacatttggcataaggtttgttataataccaattcgacctccacgacatttgcgttctaagtttgctgtatagttatctataaaaccaaacatagcatatgatttgaatgctgatgtaagtgtattttgtgtgtttttctgatgaggacctgaaagtatatgacgttttgatgtgaaccttgtcataagttgaaggctatcatcttcatatgaggtatttgtatatgcttttagtgcaagtagccgtaatgaatatagaacttgttctgaagagcctaacaatatactttgcatactttgaagagagcttatttgtccagcacgattatatcctggtataaatgtgtcataacatttgtacccatgtcttccacccatgccacctaaaggtcctcttgttagagctgttggctgctgttgttgctctccatttttttgtcctttgcctttccccttacctttgccttttcctttactttttttactttgttcatcatctgagggaccatcattactacctccatcatgttgagatgaactaccactattctgttgtctcttgtcatcattatcatcatcactatcagtatcactattattctgttgatttgctgataatagtggataatcttctggaccaaatcctaagccatggcctcctgatgatggtccaggtctttcgtcatcattatcattttcctctcttggctgtggttgggaggttacaggcgctgccacacatgttacaagagaatgcatagcttgttgtatttttgcccattttttaggatggtgtttttttaaacagtgtgtaagaagagcacaagctgcacctgtggcacagccagtagcaccacttgttatagcggttactgctgctgatgagccacaaccatgtgccatagcactactagctcctcctatacaacaattacataaaccactacttgtggcaccacaacatacttctttaatgcattgtttatcttctgttgaaaattctgatgaaacttgtggttgtcgttgtggttgttctgtgattggttgtccctctttttttgattttatgccatgtttttttaaacagcagtccaaaaagccatctctttctaattcgccaaggaaccaccataaaaatccacaaagactaccagtacaacaacctgaacctgcacctgcagcagcactttctatcattttactaaggtcccagtgagacataatgcctcctgcacaagtgcctgcaatacaaccagcccctgtaccaacagcagctcctaatgccattttttcacatatacttttacagcatgtcttacattcttctgtatcatttatttcccttgttgtatgtccatcttcccttaagtgttgattcccatattttttacaataataacccatacctaagagaccacatgtacataaactccctgaggaaacaaagctagcagttgttgaaacatcagcaccaaggagataagcgcccagtgagccaaagagtgtaccaagacatgatccaaaagttgcccaccctgcaaaatgatcacatggatctggatacgtgcaaaccctaacagtatagtctgtcatagtacaacatggggaaggacaagttcctctatcaatatcttcatttgtcatatgtggatcagtagcttgtccagaaaatgattgaggttgtgttgtgattgggaggtgtgatgtacttgaggtcaaatggtgttgagctaatcgacttgactgatgttcgctaatattgcttgttattctgcttgatgattggcaacacattgctgaagtagcatataaacatgaacttaatggaccacctattgcagccccaattccagctccaattccacatgctgcagccatgtctgggcagggagcacctgttgctgcactagtgacaagaccaactccagcgccaaggagtccaccagctgaaatccctaaacctgtaactttaaccatgtctttatcacatgtaacatagggagaatcttgttgacatccatgtgttttacaaagtgaacatgctgttcctaatgctgcgccagcaacagaaccaccaagacaagttccagctcccacagaccctgtcgcaggacaagcacagcttgtcattgcaccaaatggaatcatccctgctccaataccaagaccagcaccaatacatgctcctttcaggcaggcgtcaagactatttttatcacagggaggacaacattcttgaggactagaaagtcctcttgtaacttctacggaactactcccagaacttactgatggactagatgaaccaaagcctgaagattgtggctgacttgtaattggtgaagagccaccagagcttcctcctgagtgatgagtaccaccatcaggaccaagtttaaggcataggggtttaggtgatttaccattaccattgttcatagctaggagttcactgcttccacaaaataagcaaaaaaaaggtaatagtaatatagctattgtttgttgtaaaagtgttttggttagctttatatgttttggtattctaaaaattttatgtatttttttatcatatactgtatgtaatattgtattaaatgtttgggccttatatatacatatgtttcttatcagctgttgaaaggtatctgataagttcataatatattgtgatataaggtttttcatatttggttcccttagtataatggttaatattagtgtgtagttgtgattttattttttgatatattactaagcatattatattacttttatttaaaacgtgttactattaggtaataatatgttacgtagtgtagggtatcctcttttgttttttgtttatgaatgctctatgagatagataaaaaagaagaagtcataagtcggattatgactattggtagtattcctcttttttaagaaaaaatgagtatagcaaatgtttttatcaaacatttcacttcataactccaaccataatatatggaagtttctatctacataataaataaaggcgcagtacaatcagcgtgttaattatctatatttaaaggataatttattcaagtagttgtaggaggttttttagcttccctatgaaggctataaacataacttgttgtaaataatgtattttataaatagaatatataaaatttattatatcaatatatacagtagaattatggtatcctaaaaattaaagaagattggtatatggtatttgaatatttcacatagctataatgatgtaatacgatatattgtagatataatagatatgttatagtcctttaaggatagtatcttatttattactattatcttttttatgtagaaaatattttttaaatacttctataacaaaatacacaacatttttactaatatacctctattatagtagattcatattacgtatctatatagtagatacactaaaaaatatagattaacttatccattagccactctttatctttatagtttttttatatcagctgacattcttcaatcttttttaaaacagtaatcgttttatggtgtcaaacatgaactagttacaaaagatgtaacacataacactatattcaaatatccaaggctcattaaatatagacaagatatctaactagcagacaattattgaaagaaattatcttgttaattttagtattggggggtgtatgaacaggacattagtttctctaatggctgaagttccagtggattccatagaagacgagcagggtttaatacatgtgtttcctttgggaagctttacagctcgtgatggacctcctgggacattaggcgtgccagcaacgtcatggcagcttactttgtctggagcacaggaggttatacgacgttgggagacacgtaagacacctcttgtgattgattatgaacaccaaacatatgaaacaaaaggaaacggtcaaccagcacctgctgctggttggataacacgtttacttcttcgtgagaatggaatgtttgcaggtgtagaatggacctcaagggctaaagaatacatacgagcaggggaatataaatatatttctcccacatttctttttgatgcaacaacaggagaagtattagagctttgtagtgcagcactgacaaatatgcctgctttagatggaatggaacctgtaaaagctaaaacacatactacaatacaacttcctaagaagaaatattcacatactgggtctaaccctctacaggaaaaaggtggagctcttcacttagcaatggaattttgtgaaaagggagaaaccgatctgtttaaagagaatgtttcttctttagaagcttctgcaacagcatttcttgaagagataaaaaaaacccagggacaacaaaaacgttctaaaaagaatagaagtgtttctaccaaatctaatatacagcaagaggcttcaagtgatcgtttctcagagcttatgggactataccatgaagcacaaaaagaagttgtatcattaaaagaacgtatcaaagaatacgaatgtaaggaagaatcactaaagctagaacaatgtatagagaaagcattgtctgatggtagactacagcatagttgtgaagcttgggctcgtgcgtgtgcggtgagttatcctgaagtgttacgtgcttttcttgaagcatctacttctatggctgcgcttgtgtctatgcagacacgtcaggggtctcatataagtcaaagtgggtatggacaatctgctttgttatccacagaggaggagcatgttcggtcacaactgggcatgagtgtggaaacgtttattaaacataagaaggagtgccaataatggctattgtaacaaatacaatgttggaagcgcttcgcgtaggctttcgtgcagattttgaagaaggtaaagctaaggcacagcctcagtagcaattggcagcaacacatgttcctagctctagtgcttccaatacatatggctggcttggacagttccctaaacttaaagagtggatagggaatagggtctttcaagatattgctgaacatgaatacacagttgcaaataagctttatgaagccacagtaagtatccctcttacagctattgaagatgatgaacttggtgtatataaaccactctatttagaaatgggatatgcagcagctgttcatcctgatgagcttgtatttaaacttcttgctgaaggacatacaacaaaatgttctgatggtcataatttttttgatacagcacatgtcatctatgaaaatgaagatggttctggtgctgaaacaactgtttctaatagtttatcacctacagttagtggagttaaaaatgttgttgttgttgttgaccctgttgctccttggtttttgttggacgtgtctcgtccattgcgtcctttgttatttcaagagcgtagtctcccagaactccaagtaattacaaatcctgaaaatgaacatgtttttacaaccgatagcattccttttggtgttcgctatcgttgtaatgctggatacggtttttggcaaatggctgttcgttcaacagaacctttgaatgcagaatcctttgagcgggcattaatgactatccgtagttttacagctgatggaggacgtcctcttggtcttggtcgtggagggaaagaaggtcttgtattggttgttccatctgttcatttatcaagtgcacgtaaggttattgtagctgaaagattagataatggctcttcaaatatctggtatgactctgcaacaatcattgattgtccttggttgggataactatgtacgtccaatataaagatcttcagacacagtttggcgaagcagaaatgcttgccttatgtggtgatgaagatgggaatatagatatgcctcgtctcacagaggttatcaatcaagcaagttcagaagcagattcatatctgggtaaacgttatattgtgccagttgagccagtaccacctgttcttcgatttatagtaggagatatggtccgttatcggttgaccagtgcagaagctttggagacgtcgttgattgttcaacgatatcagcaagccatagcatggcttataaaggtttctcaaggggagattgtactgcctttacctacagtgaatagtgaagagcaaatggtcgtcattgacgctggtacaaggctttggaaggtcacaggagcacggtataagaaagctcaagagacaccattaccagcaagattgactatatgagcatagcatatatggagtctatatgttgtcacagatagaagatgcaatgattacttgtatcaccaaggcacagttaccatatttgcgatttgtgggttcatatggtggcgagtttgatggagaagttcctcatgttgtgcgctcacttccaggtatatggctagctttcaaaggagagagtgcaccagttgctgtagatgtaacgcatgagcgatacaaagtagaagcacggttattgttgcttgtagcagctcgaggcatccgtaatgaggcagatagccgtcatagtacaaagatccatgtaggaacatatcaaatgttggcagatatgcggtcaatctttgcatttagagatcttgggattaattcagtagaatgtttagtcccaggagaaacaacaagtctctttaatgggaagacaaaacaacagggcctatctgtttttgctcaagagtggattgtaccatatggtttttacgttcgtgaacctgggaagcgccaattagatgaaccatattcaggctatcttatgccagaagggacaatgataggcaatactcaggttccatacttgcctcccctgcaaagattgaaactttgctattatataggtggagaagaggaagcatgtgatcaggctcttcttgaaaaaggacgtactttataaacaacaccgcttgattaagcggtagatataactatcgggacagtttttaggttttgagcccgaaaaaaggaaaagctatggcaagtccaaatattcaatttgacgctattcctgtcaacatacgtaaaccaggaaagtattttgagtttaatacacgactggctgtacggaccctcccaggtaatcctcagtctttacttattattgcacagcaaaccggaacagagccatgcgagccaagacggatttttgatgcagatactgcagggttattatttggttttggttcacaaatccattcaatggttttggctgccatgcatgcaaatccatatcttgatcttaccgtgttgccattagcagatcctgaaagtggtttagctgcaacagcagtagtaacacctagtggagaagcacaaagtgctggcgttgtaagtattactattgctggaaagacagtttctatggctcttgctaaagatgatacaccttcagactgcgctgtgacacttgcccaagctgtaaatcttgttgaagaactccctgtagttgcttctgtaacagagtcaggggtattaacacttacggctaagaataaagggacatgtggcaatggtattacagtgtctgtgcagtcttctgtccctgggatgaaatgcacattgacacctatgagtggtggacaaggtgaacctgattttcaagcagcattagctaaagtcttttcaggagattatacaatttattgtgttgggacaacacaatcagaacatcttaaagcattgagcgatcatttagcatctatgggtgctcctttagaacaacgaggggctataggtgtgtacgcttttgcagggacactagaggatgctattacattagctgaatctacgaatagcggacgtctcacaggtgctgtattaccagggaccccatcgttatcatatgaggtggcagcttcttatgctgcaacaattgcttcagaagaagatccagctcgtccgttaaatggattaacccttaaaggtattattccatccccaataagtcagcgtctttcacgcacacagcaagaagtagctttgaaaagtggtgttacacctcttgaagtaggtactggtgaagttgtttctattgtccgagctattagtacatataccaagaatagtgaaggttctcctgatagtgcactacttgatattacaaccattcggacattggattatttacgtaaagctatacgtgaacgtatgagtctaagattcccaagagaaaaactttctacacggacattaccaaaagttcgtagtgaagttttggatgtcttgcggaagatggaagagttagaaattcttgaagaagtagccagtaatgcagagggtgttattgttgaaagggatattgaagatccaaatcgtttaaatgcccgtattcctgctgatgtagtcaatggtttacacatttttgcaggcagaattgatttaatactataataagctgtcattaactatcattagcagttaactgactatagaataatgcgaaaatatagcccattttataacatgatgtaagaaaaagacagtataattggatagtaagggtgtgttgttgacttctagtgatagtagttctgaatggtactaaattttttttagtaccattcaaaaaaatgaaaagaacttaagtaagataaagagatatttgttcataacgatgctttcagggaaatggatcagtctaaaggagtgaaaaatggcattacagcaatatgtgggagcaattatacttgaagtggatggccaagaggttgaatgtaccgctttttctccaacaattacaacaggtcgtattcctgtacgtacaatgaatagaaatggtaagattgctggttatgcttctggcgtcatggaatatgagttaaaggtagaagttcctgttgtatctgacaatcagattcgttgggatggagttactggtgcaaaattagttatttatccagcaaaggatgtaacaaatgctgctggacaaggacgtattgcttatacagggtgtgtcgttacatctgttggtgaagcatataaagttgaaggagaggcaagacggacaatttctttgttcgcaacagatatgattgaggaataatatggaaataagcggtcagttggaaattggataccaagatgatcaaggatgttttcataaaacctttactatgcgattagctacacttgaagatattgaaaaggctattgaagcagcaggaataggtgcatcgacagcacgaatccgtcgttatgaatgggcaagaacgttaacacaacttggttcatttaaggatgaggcaattactcctgaaatgttagctactcttgcttcgacagagtttggtatccttgaggatgcacaggaaacactaaggggaaagctaaaagccgtgagcaatgcctcaaagaatacagagtgttagagctttgcttacggcaaatgggttttagcttatctgagattcgttctatgtcagtccaagaagcagagggatttcttgaatgcagacaccaacaagtcagacagcaaaaaatgccaacaacctatctaagcttgcggcaacgataggatctattgttagtatgctacttataatcctagttttgtttttggtaatggatgggatacttctgtggtttttgtgttaacatagtgtaggttaggtgaagagaatatgaagaatactaatgcgttagacactattactcttatggatgaaaaccaaaaagaagatgccaagttacatccaggttctgcattggatatagagagagtcgttgctaaacaatatttcccattacctatagaagattatagtgatgtcccttttgagagaatagagaatacacagccctcagattttggagatgcaacaatacataataaatataataagcaagtaaaagaagcatctttcattaatacagaaacctatagcagggtgagttctctttcttcagaaccattgagaaatgttgtcccacgtttttcttttgacttttctacatctatggatggtagtggttatataaaagagagcaggttatctccatataaagaatatccacaattagcaccaacaccattattgtataatgaggtatctatggtgcaggccacaacagagaatactactaactcacaacatccattatttactgaacaacaatgccagctcccgcaggtaactactagtccacagatagcgttagttatgcctcatgaagaacttgactatgttcccataagtaagaactcctcaatgattggtaataatatagattacactacattaaagagttcttttttttcacaggaagatagaatagttgataaatatactagtgatagagacaaagagaattttattccttttttatctcaaacacaaaatacaaataccttgtttgaagatatagaacaatcatctaatacagatgcattggaacagcaaatacatttaatgacaactatagaaattgatggacaagtattaggtgaattttttgaacgctatatctctaaccaatcattacgaacctagtatctatatattgaatgtaactatttttttatctatataaaaaaatttttttatatatttatattatttcccaaattatagtaataaaatgtaccttttttatttttttagtacacaaaaataatactatagagttatacatttcatatgaaaacaatcttaaaaaaaataggatacgtttaatagtaaatattaaggatagtatagtagataattattttttattataatgatgtatcctattttggttgattgaaataatgatagagtaactattgtgttgtggtgaagctctttggaggttgtcgatagatgggttggaatacagatttacttgatgcacaatttagaggcattcctttttatgtacaatcaattacagataaaggtagtaagtctttagttgtgcatgaatatccatatcgttcaggtggagccgtggaagatatgggcagttcagcaagaactatccctattcgtgctattttttggggagagaattatcttagcaatctccaaaagcttattgaagcactagaacaaccaggaccaggagagcttatacatccagtttttgggagtgtaactgttgttattaaaacatggcagattgatcatacagcacaacatcctgattatgcagaagttgtatttgaagctattgtttcagcattagatacaaatttttttacacatactacacaaagaacacaggcagaacaatcgtctcttactgctaaaaatgctgctacagtcttattagagcattcatctcaacatgtaactaggcatatccaaacaaactttacatcacctagagtacaatctcagacaatgcaactattaatggacatattagatttttatgatccatcgggtgatgtgccacgttcaactactatttttgttttgcatccagaagcatatcttgctgaacttcttgctgttcaaaaggctatcttagaacatatcccagtgtcatcagtaatgaaaggatttccttattggtctgattgtttcccaaaaattacaccaagttgtggaatgaaaacgtttgaatacaatgaaaagtatcctacaggagtaggtaattgcagtgttcaatggacgtctaatggaagtccaggagtacatcctcaagtgccttctttagctattcctcctaatagtactatagagaaatacgttgttcaggatgaaatagcctcagggtgcgatgtaagtatgtcttctcaacatatcatagctataggtattatattacacgtgatactgagtcagacagctttagctattcttacagcaagtcaattgtttttggatgagtgtactacccccacccttacacctcttcaacttgatacaattgtaggtaatattcgtgcacgtattcaagattgtcttgttgcagtcagaaagaatgttccaacacaagatgtccatgggttttcagaaccattaagaacagctgcagaagctattcagtcacttgggacaatagctctcaatatacgtccaccattgatcacatatactgttcagcatgaggagagccttcatttatttattagcacatagactatatggtgattataagcgtgctagagagatcctccatttaaatccacagatatatgatccaaattttcttcctgctggacaggaactccttatttatgcagccgatgggaacactgtatgaatacagtaacaactattcgtgatgtttgtcctaccttgtgtgttgctggtcatatgcatagagactggttacgatattcagtggattcaggtttctttactcctgctgatggatggagtgtaagtcttggtcttccagatggtaaactcccttcatggcttgcattatgggctgaagtagaacttgcttttgatggaattgttgcattaacaggacgtattgatcatatccgtcatagtgtgaacactaaaggacactctttggaacttgctggacgtgataaagcagggatactcctagattgttcagcgcctatttttgttacacaacagataacgcttcctgagttgattgctactgttgtaagaccgttagggattgatactatcgatgttgatacactttcaactttattgtttcagaaaagtacagtagagccaggaatgacagcatgggaagctattcaggatgctgcatcagctaatggattatggccatggtttactccagatggaacgctaaagattgctcgtccagattattcaaaagcacctgtcgcttgtttaaaccttagatgttcaggcgtaggtaataatgtccttgaattaagtgtaacctatgatatcagtaagcaatactctactgtaactgctctttctcaatctcaagggaatgaaatttcacaggcaatacctatccttaaatctgttgctacagattcagacacaccatctcgtccattagttctcaggaaaggacatattgataatacacagtttttaacaaacatagcagagaatattattcatgaagggaaactttgtagtgttacagtgatggcaaaagttcaggggcattttgttgagcctggagtattatgggaaccaggacaacgagttactatttttagtgaacctcatgaaatagatgaaacgttttttcttacaaagagaacatttataggtggtcgctttggaacgtttacactgttgaagttacagcaagacaatgtatggttgagtacatagtgagatattcaaaaagatggtagattataatagtaccatgtatcacaaaaaaaaggaatctttatgtctttttatgatgcagtgaacaagcaaattaataaagcacttgttgctgtaagacttccatttcgtgcccgtttgacaaaacttcagacaaaaacaccattgcaacttgtacagggagaaggtctttcacaagaacaactacaatctgtagaacttctgcaacagtttgggtttacgtcaggtgtccccatagactctcaattaattgttcttccaatagggggaaagactgttcattcagttatcattgcaacagaaaatacagcatttcgtgtccatgttgaacatggtgaaacagctatttacaatcaatggggagcaaaggttgttcttaaaaaagaaaagattgttgaaatcgactgtgaacaacttcaaattaaggcaacaaaaggtatcacaatgcagacagagtcattttctctctctgcgtctgaagcaaagatgaagacaaatcttcatgttgaaggagatgtctctctatcaggtaagctagaatcagatggcgatcaggttgctgcagggatttctcttttacagcatacacatggtggtgtggagtcaggaggctcaaatactcaacctccctctaagtaagtgtggggtggggacaaagatacaatcgctattcaggggaaatagcgtttttggtgatagagtttctagtccccacaggtttatgaccttttttgacctaacagaaaagtactacatattatattaagttatattaatgaaggatcagatacttgttgtcgttgatattgggtctgtttgtatacgtatcttttttccagtaagagtaaatctcataataccaacaagtccataaaaaacagggatcatagaaactgtaaaaaagagtttccaggaatagctgttaccaataagtggaagaatctgttctggaggtagaatcccaaatagcgacatcacactgataacaatagatgtatcaattagaagggatatagacgtactaccactacttcttaaccacagatatttaccttttgttattttacgtatccataaataaaagataatatcaaaagcttgggagatataacaagctagaattgaaccaataaaagctacactataaaatccaaagacattatggaatgtatcattatcaagctttgaccattcagtagcagtaagagaatccataaacataaggataccagcaacaacaatattaattatgatggcaaactttacacaaaaattagctcgctctttactataaaactcagtgataaggtctgtaagaaggaatgttaatggatagagtatggcacctaccgaaatttcaaatgtatggaatggcaaaataggtaatgcaacaaatttttgataggtaaggttacttagaacaataaggatagaaaacaatccacaaagaccagtgtatactttttctgcttttgtcattggagttcaagaatattattatttataggttttttctctttactcaatcagaatcaagtagaatatcttattataagatatcgttgtataatgtctaggggatatttattttttatttgtaaatgtcattagctctagtataccagtataaaggaatatctttcatgtctaattaaggaataggatatctaggattcaagagtagtttttataatggaggagttgtttgtcgttattgttattggatattacatagtgaacatgtagtaccaatattttttgtttagataccctatttaatgtagttgtatctaattggagggggtattacatgggatcatttgttttaacagcaacaacttcaacttcaatttgagagtgctcacggagcatactagcagcatgaaatctacactcagggttgtatcctaagaagaagtgatcgtatatgcgtttaacaagtttgtagtttgatgggttaacaagagtaatacttacttttgttacatgatggaagccaaggccagaggctgctagtgaagcctctatatttttcatgacttgttgggtttgctcttcaattgtttcagggatagtatttgttgatggatctcttggtaattcacagagatagatacactcgtttgttagaatattttgtggatatggatctataggccgtacaggagtaatagctgaaatagcattaatcatagttttatccttatagactaactgggtgagtatgtcatagagtggaaaaggaagataaaggcattgtaagaaggggaaatgtggtattattaagatgcttgtactttaatatatatgacagaataaaagattgacaagagggtaagagcttttttgttatgtattactaataattactagctattttttttagtagtatatatagtagatagttctttttagaaggaaataaaggataagttaataagcagttagtagaacaagataattgttgtattaatcatcccaaatttttatatgtttcaatagttgattatatgttttgcgataggcataactagagagtttctttagagtcgcttttgttgatatctgcttagcttgttgggctatattaaaaagagaaaaccatttatctataatatgttgtcttgtaaaagtatttgcttgtattttataatgattaagaatgcgtgtatattcttcaggatgttgtttcattctttgaatgtattgaataatatcgtttgttgattgaacctcaaagtagtcatcgggatgttttcgtaatgcttgataggcaggttctgctccaagaagcgcaggagtatttgcatgccaagcattaaataattttgaaggaggttttgtattcaatacatatttagaaactttaggccgccaagcaagaataagatctgtattggagtaatccatccaattgcctgcattcattacatgcagtttgatattgatatcttttaatctttggataaaagctggagaatggatagcagggggtaaatattgtgcactaccaggaatagatattcgttcgattgttgttcctctaagaggatttcttggtatgaggcctggttgtatccatagtgggatataatggacacgttgtgtttgagggatggcaggattttgtataatacgtattccggaataagggacttttggtctatctgcttggacaacaataggataacaattaaaaagaccataacacggttttgcatgatcgtaatggaaaatggatatagcgtcaggcattccatgttctacaattttaaatgtatatccttttgtatcagataaatgagagagaataatccatgtttgtaaaagccatacatctacaccacttgtaagttctggagcaatctcctctatagagcattcaccttttgctgcttttttgagctggtttgaccatttagcttgatgatgtcggggaataacaaagtagattatacacatagttggttatctttttttttttttacaaaccctactaaagtagacactaataaacatagattataaaaaatagtattataccatattatatattgttatttattatatgttgtaaataccaattatatgtttttttgattccttcatagagagatattgttggtttccaaccaaggcttttaatttttgaaatatctaaccatttttgaggagtgccatctggttttgatggatcggttacaatttctcccttaaatcctacaacatctgcaatagtttttgaaagactatagatagtacaatcttccccatagcctacattgataggctctagttctgagtatttctccattaagagtagacaggcagaagctacgtcttctacatataaaaattctcttcgtggagtgccagttccccaaatagttacatatggtaaattattaaccatggcttcatggaagcgtcttaaaagagcaggtaaaacatgactttctgtaagatggaagttgtctcgaggtccataaaggtttgtaggcataatactgatggcatcaaaaccatattgttttctatatgcctgacagagttttatccctgcaattttggcaatagcataccattcattggtgggttcaagaggaccagtaagtaagtattcttctttaattggttgaggacagtctcgtggatagatacaagatgaacctaaaaataaaaatttttttacaccatatgtatatgctgtttggataacatttgtttgtatttggagattatcagagataaatgttgctggataaatattatttgcctgaatgcctccaactttagcggcagaaaaaaagacatattcaggacgttctgttgcaaaaaaggattctacagctgcttgatttcgtaaatcaagttcttcttttgtacgtgtaataagattggtatatccagcagattgtaatgtttggacaagcgcacttcctactaaaccacgatgtccggcaatataaatacaagcattttttttcataataacactttgtatatagattggtaagatgtattctatattatactagaatgaagatatagcaagtgtagtagatatcatagaaatatgctttgttctgtacttgtggtatattcaacaagcaagcctttaaggtgttagttaatagaaaataaagttgggtatacagatactggcgtgagtaagtatggattatagcataaagtgatagtggcttatactaataaatagagtaccattaacatggtgtatgttgaggtaatgggttatattatattcacaggacgtatgagtgtattttttagataatgtaatgtgtttctaataaaagttggggccaatgtataaatatgttgatataattattttgaaagttcttcaaaggcagtatatcgaggaaggaaggaaagttcgactgtacctgtccgaccattacggtgttttccaataatgagttcagcaataccttttttaggattatcttcttttttattatacacttcatctcgatagataaacataacaagatcagagtcttgttctatagctccagattctcgtaaatctgaaagtaaaggtcttttatctgcacgttcttcaagtcttctattaagttgtgagagggcgacaacaggaatatttaactcttttgctagagctttaagagaacgagaaatatcagagatttcaagttcccgtgagtctgcttttcgtggagaacgtagcagttgaaggtagtctacaactataagatcaaggttatgttctattttaagtctacgtgcttgtgagcgaagttctaacatagtgagtgctggtgtttcattgatataaagaggtgcgttattaagcaattctgtggtttggaatagacgctctccttcttctggactcaagcgtccactgcaaaggttatcatatggaattttcccccataagctggccatgcgttgtataagttgtttatctgacatttcaagggaaaaaatacctacagttgctttttgtgtgattgctgctcgcatagcaaggtttagtgctagagctgtcttccccattgcaggtctggctgcaataataatgagatctgaaggctgtaaacctcttgtaatttgatcaagagctttgtatccggtagggagccctgtgacgccatgtgttgctggttgcatggctgtattaaggagatcattaataagtgaatgtacaggcttaaagacacctacattttttctagcagatacattcatgatggattgttctgctttatctaaaagggttgaaagttcttgagttgtatcaaatcctgacgtaacaatacttgagccagcttcaataagactacgttgtatagctttttcatgaacaatttttgcataaaattcagcattggcagcactaacacctaattgaacaagttcacttagatatgatgctccacctatagcttcaagttgatttttatcacggagcttttgagctaatgttactagatctataggttggttctggctatataaagtaatggctgtaaagaaaagaatttgatgctgagggaaataaaaatcttctgcttgtaagtcgatagccatttgtggtgctatagatttacgtaataatagtcctgcaagaacggcttgttctgcttcaaggctatgtggaggaacacgtagtgtaagatcttgtgtagctttttgaagacgttcctttgttttagccatagatacttcccattatatggatataataaacaacaagtagtatgtatatattttttgaaagtatatccatgtctatatgtatatcatttgaaagataaacagccaagatctggtatagtcatagggtagttattttaattatagttagataaggagtaaccgtttttaatttcaaagaatttaaatcctacttataaccttatatggtaaagctataatgattgaaataagaggtttaatatattttattttgtattttaaataggttagatacaaaatatattattatgttctgaagaacttgccaacttttttttcttgtttattatatctaataggtaattttaattaaaaacttttaacccttttaagagactatgttttttaagtagccttggaaaaacctttaaactttttttaagaggtcttgtcctttaggtaactttagttaaaaaacttttaaaccttttaagagactatgttttttaagtagccttggaaaaatccttaaactttttttaagaggtcttgtcccttaggtaactttagttaaaaaacttttaaaccttttaagagactatgttttttaagtagccttggaaaaactgaagtctattttaagaccacgtcaaccttagggaagatgacgtggtcttactatttgtgataatgtatcttgatatgtttttacaggatatttttttgaggtatgtttatttatcttgtatagttattgaaatagttcttattttgcttcattattatgataattgtagtatctaataggaatcaggtttagctgtaggttaaaataaataactatggtaggttactttatgaagcgtgcacttattacaggaataacaggtcaggatggggcatatcttgcagaattccttatccgtaaaggatatgaagttcatggtattaagcgtcgctcgtccctttttaatacagatcgtattgatcatctttatcaagatcctcaggtagagaataggaagttaatccttcactatggtgatcttacagatgctacaaatcttatccgtgttattcaagaagtccaaccagatgagttatataatttagcagctcaaagtcatgtaaaagtttcttttgaatctccagaatatacagctaatgtggatggccttggtgctttgaggcttcttgaagccattcgtattttgaatcttatagataaaactcgttattatcaggcttcgacatcagaattgtatgggcttgctcaagagatacctcagacagagaagacgcctttttatccacgttctccatatgcatgtgcaaaactctatgcttattggataacagtcaattatcgtgaagcatatggaatgtatgcttgtaatggtattttgtttaatcatgagtctccattacgtggggagacatttgttacacgtaagattacccgaggattagcaagaattgcacttggacttatgtcaacattgtatcttggaaaccttgatgcattaagagactggggacattctcgagattatatacaaatgcagtggcttatgttgcagcaggataaaccagaagactatgttattgcaacaggacgtcagatatcagtaagagagtttgtaaatattgctgctaacgagttaggtattacactttcttggaaaggatcaggggtagatgagcaggctattattgaaactattgatgctacaaagcttgctcaaatgcttagacgtcctgtgtcagaagcgccattaaaagttggacaggttattataaaaattgatcctcgtcagtttaggccaacagaagtagactctttaattggagatgcttcaaaagcacagcaaaagcttggatggaagccaatgatttcttttgaatcaatggtgacagaaatgctccaagaagatatatcactagctacccgcgatgccgtttgtaagattgctggctttaaggcatttaatcatgatgagtaacactacatgtctattatttagttattacttttattcagaatgttagtatattatatttagtctaaatgttataccgtatattactgttaatcatataatatatagttataaatttcaatatgtaatctgctaacatagtttactctatatttttttctacaaaatagtataatataaattaagacatttttaagtatatatgtaatgtataaatattattatgaataaacatataagatttttatattgtatttttaaatagataagcctattaatttctttattaggtatatactataacaaattaactcttattttataggtgttatttgacattatatagaaatatagttctattttcaatgagtatagaataggccaaatgaaagaatgaataataatttttctaaaaatttaggccttattattagagctattagaactaaacataaagatgaaatagtattagatagacttgcagaactctcaggattaacaaaacgttatatccagatgattgaaagaggagaacgaaatataactgttataaatcttttcccattagcaaacgctttggatataccaattatacaacttatagaatatcttaattatacattagaacatggtagtttaccagactttcttcttgaagtactaccaattaagaaagttggacggcctaaaaagaataaaatacgtaatacaatgtcttaacattattaatagttatagttgatagtattaatttagttaatggatggtttttttgataataaaaaaaaagactgaatttcgtcagtcttttttttatcaaaagaagacctattcttttttcctttagtaagttttttgaaaaaaggaagaggaactatgcattgtaacgtaaagtttgttaataaagtatgtagtgctagaagatggtttagtatatgtgttatccttacggtgttattatttttagctttagttattttttcaccaaggcaactacctgttatccattataaatttgcattatgtcttttagctggtttggctggttattggcttgatcgtgtactttttccttttgctaatcctagtggctatctatgtgaagattggaaagaacatattaatgggtgtcaaactggacgtgctgattacccaatagtgatagaatatcaaaaaagtttttgtacggctatgttacgtcaagcagctattgttgtaggaacaatgttagctgtaagtttaggattataagttttttgttaggcgttaacagcaggacgtgtatgttagcgtctaacatatgttaacacatactcctctccctactttttataacatattttaatcgaatttattgtaagtagtttttgagagatccagggatatttacttttagttgaggcataagagaaagaagacattttttaagaggaagaagataaaggttaaggttccatggatgaatctttattgctttgccataccaagataaggcactagaaatattttttgttccaaaagcagcaataacagcaagtttaaatgcaagatttgagtagctcttttttttgatatgttcaggaatagtaggatgttctatgtgttttttcatataataccattcatcttggagcgcttgggaggcatacttttttacagaatttcttgtatgaatacgataatattttaatgggattgggatatgaataacttgtgtaaaagatgatgactttgaataaagatatgcaaggattcttaagataaaatctctatcttctcctacaagaagtgtcgtatcaaatactccaatatgttttataagctgtgtttcaacaagaaatgctcccattgtgaaataggtatgttgaagaaagtcccaccatatatttcctgttttatggatatccccccaaggttgtggtttttttttgtaggttacgtccatgaacatgacagtattacaccaactaagcttagaccctggtgatgtttgaagtgcattaagcattatttggagaaattgggagtcccaaagatcatctccatcaagaaatgcaatatattgtccttttgcatgactaagacctgtattcctagcagcagagacaccttgatttgtctgttgaagaatatgcaatcttggatcatgtatttgttgaatagtaggtacagtattatcagtagagccatcatcaataatgatacactcaaaattagagaaggattgctttaacacactatgaatagtgtccgtaatccatggctccatattataggtaggtataataatggatattattggcgaagtagggctcattgtttggtttgaaaattatagagcattgatttgaaaaatgatccaaaataggcagcatcaacatgttttgccattcgtaatagcgttcctttaatagtacgtgattctttttcaagacgctcaagttgtgtaagaatgtcatgaagatacggtaagtgtgctaaacaacgttcaataattatgtgatcaaagtgtgtttctgtgtttaattcttccaatgctttttgaatgctatttaagcagttattggcacgatctgcaataagtgaaagataaccatgtttttctttaaagtatttttggtttttgaaccatattgatgataattctcttgatggaagttgagaaagtgttccttctccataatgccatacaaatgaagcatctgtataagcaatctgaaatccatgttgcttaactcttatacaataatcgtcatcttcaaagtttcctttctggaattgctcatcaagcaagccaacagtttcaatgcattgcctactaatagctacacagaaaaagcaaagcattgttgtataagttaatgtgcctttctggtggttcatataggcaatagcagcctcttcccatgaatcattgggtttaataggttttttagatgatctattattagtattattaaggtacccaggaagtacaatctgttgaggactaccaatacgatttgttacaggcccaataagaccaagttttttattatgtttaagaggttcaataagaggttctaaccaccctggaggaagtaatgtatcattattaagcaggatgataaattctccttttgcttttttaagtccaacattatttccagctgcatatcctagattttttttattatctataactgtgagatgtggatatgataactgttgcatccattccactgtcccatcagttgaaccattatctactagaataatttcacaattgtttggtgttgtttgcagtaggctttctatacaggggattgtatatgatgcatgttgattgtatgtgaggacaataatactgatttctggtgaagatgaatatgtcataaaaataagtatctatactgttattctaaatagcataagagtataacagcatacagtagttataataggttaaacgtctttcatctgttgataaatactatacgatatagtcttaaaaatcatctttaattttagtaaaaattttaggcaggattagaatattgtataaataaaaataaaaaaaatatattaattattttagatggttgtatggaaaatataataagattggcatatgctgacattactcaatctttttttttataaatattttatgtaatatttacgaatggatgcagaacttgacgttagaacaggtgattacacgtcacatcaaatcaatacccttgcaaatgcggtatatattcgattgatgacccctcttgggacttggtggcaggacataactcttggctcacgattgcatgaacttgagcgtgagaaagatgttcaacgtgtacgaatacttgctaagcaatatgctgaagaagctctagcacctttattaaaagagaaaagagctaaacatattgttgtgtcagcagaaataccgactgctgggcaatgtacattatatataaatgttgaagatgctactggccgtccttacacattcagccatactatgagagtttcctgatgccatatgatataccagattttgaagagatccgtaatcgtattttaagagacactcgtaactttgaccgtgatgcacatataacaccagatagtgatcattatataagagcatcagcgacagcatctgctgtagaagggctttatgatcatcaaagttggataacaagacaaatttttccagatacataagactctgaatttttagaagttcatgcacgtctaaggggtattgtaaggaaaccagctacaagagctacaggacatgttattatttctggtttatcgggcagtgttgttcctttaggcacacagatcaaagatacccaaggggtcctttatgtaacaactcaacatgttgtgcttacatcagaaacagctagtcatggtgagcaattacaagttatgcaagttgttgcatgtcaagctcaaaaaccaggtcttattccttcatgtcaagatgttttagcaaaacttgttgcccctcctataggtattgatacaaatgtgcttcttactattacaggtggtagtaatgtagaaacagatgcttctctattagcaagacttcttgactatatgcgcgatccaccaggaggaggaacagctcttgattataaacgttgggctatggaggttcctggtgttagcaaggcctatgtatatcctcttcgaagagggataggtactgtggatattgttattacaggtgaaaatggtacaccttctacagaggtgattactatggctcaatcacatattgatacaatgaggcctgttacagcacgatcagctgttgtttttgctgcaacaccatttattgtaaatatggaaattggattaacattaagtggctctgaaacacttcaaacaatattaccagttgttaaagatgcattacaacacgtgtataatgattatgagccaggaagtggtgtagtcttatctcatttaatagctgcactaaccagcgttcctggtgtttctgatgctgttattatttctcctgaaagtaatataactgctaaccctgttaaaatacctattttaggtgaagttaggctaagggggttataggagaatgtcctatacagaattgctttcaaagttacttcctataaagagttataatccattagaaaaacgtcttgctctttctttacatgttgaagggaggattcttgatcaagcttttgctgattgtacatctgtggttggtggattggaacctttcaaaaatcagcagtggatagcaaattgggaacgtatttatgcgttacctggaaaatattttaataaaaaaatgatgtatcaagaacgtattcaacttttagtgttggcgtttcaagagcggtcaggtatttctcgtgattggcttaaacgcatagctttacttgttggatatcctataactattagtgaatatcgaccttttagagcaggctcacaagtaggagaaaaattaacaaatacagattggttatatgcttttactgtacatgcatcagggaatatttctaaacgttttcgttcaggatgttcaaaaactggtgagcagctttctgtttggggaaatgaactattagaatctgttattgaaaagtataaaccagcacacagtgttgctttttttgcttatactgattgagaatattcatgcatcccatcttttaatttatggtagtaactaaagttacagctcttttattttagttatctacttcttttcttttgattaggttcttaacttatctagattaaatagattatcttatatttgatgcatatcatgactgtatcagtgttgatatattattattattattattattattattattatttattatcttccttatataactattaagaattattataaagagatatggatggaatattgttctaatagagataaaaataagaagaaggttaaaggttgctaggaaggattataaatgaaccaaggggatattttgtgttgttgtgatttcttgaaaacatagggtttcctcctctcctactattgttttcaatgagctcttcatttttagggagggggttgaagagtcttcacagaggttacacaaaagggtgttacccccttggggaatttgtaatactatttaaagaataaatactattaagtgagaaagtagtagttggcttatagagcgttactctttcctgaacatgataggaagttattacaaatagatttataaatagtatagatagctatatttgtcatttttctaagatttgttagtctacaaacattattttgtgtatttgttaccattaaagggatatccttttcattaataactttgctatattttttgttaattttttaggaaagtatttttcatttagtagtgataacaactaaaaatattagtttaatatttttagtattaagcagtattatataagcagtttactaaaatattagtaaactaatattaataactatactttttttttatttttagcaactatttttttcactattactatttattaggtatccagtcatttttttaagctaagttttttagtgagcgttggtgcaatagcagccatacaaagagttccaaacagtgaagcacttccaagagcaaggaaaagcgctgcataattattggttagttgtgaagtaggaatattcatttctggatggataccaacttgagctgctataaatcctccaaaaattgtagcaagtgcttgtgaaataaaccaagcacccatcatgaatcctgtacttctttgaggagcaagttttgctatcatagcaagtcctaggccactgattaataattctccaatactaaggaaaaagtatgtaataacaacccagtttccagagataataccttcgcatgattgtgtataacttgcagcaacacctaacgataaaaaggcaagagcacaacagaacattcctgcagcaaatttagaaggtaaagagacgtattttgctgagtggctaaaaatatatgccatgatagggcttgcagcaataatccatacaggattgagactttggaaggctgcaggttctataggaaagtctaaaatcatatggtctgtgcaacggataacaaagagattaagggaggttggcatttgttgatagagaatataaaaaccaacagcttcgacaataagaaaaaggcaaacaataagtttttttctttcttgactattggaaagtttgatttctcgaaagatcataagtaatactataattgcagcacagtataacatggtataggcaatataaaggtgactaagtaaaaccatggaaataccactgatacctattactatactgagaagaacaacaatatcacctagggatagtggttcaaatcctggaggtgaatcaagacctacaagccattttcgtttaattataaaggctaagatagcaagagtgagccctatgacgctgcttccaaaagccatatggaatccaaatgctgtataaagatatggcacaataagcatggaaataaacgagcctaaattaatagacatataatataatgtgaatgcgctttcggcctttggatgttcataagggaatatttttgctattaatgttgaagggtttgctttaaaaagtgtattccctgcgataataatactaagtgccattgtgatggttccatttgtacctataaaaaggattagataaccacatagtagagtaatagctcctgctaaaagcgtacgttgggttccaataattttgtctccaatccatccgccaatgaacataaaagtatatgcaagaccaataaaggcactaaatagattttcagcagtagcatcagacatacgtaagtcttgaatcatgaagaggacaaaaatagcttgaataccataaaacccaaaacgttcccatagttctacaaaaaaaatgagtttaaaagctggggggaaatatttggatatggaagaagacatgatagttctccatgtgttgatcagtaacttttaatggatattgagtaataaaaaaagagattagattttttgttggaacaaataggtaagcaatgtaggatataattagaacttttctaatatataagaactcaaagtcattaaatcaacccataataaccattttttattaccactatccctatttactctaaccctttttaaatatagtatgaactatcgttcatgatatataaaggggttcatatagctagatatatgaatatactgttatctattgtgtcgtattttaatattttttcattactgaactaatatcttatattaaatctattattgtctactactaatttaatacataaataactatatgcattattaatgtacatatattatagtaatattagttatatatttttataaatgcaaaaaatgttttatttattaaattttaattgttattcaattaactatattaatactttttaataaaaaagttatatatatatatatagtatatttattttattttatttctaatgtatttagaaaaaaaataatatataattatatgtactattaaaatttaaattcatttgttaattaggaatacattaaatatatgtaagtttatagtaatattttataataatttttattaataaataagtattttatgtccatttatattactaaatacgtcattaatacttttttaagtaagtggagagctatagtagctttgttcctatgtatatgtattattttaaatagtgtaactgttactatttctgctgataaagattctgaaaaaaatataaattcttcaaaagaaaatattgcagcaccattaggggaaagtggtaatactgaagattttcaacaggctgaaacatcaagtaatacacaacaacctcaagtacctaccagtccttcagggatgccagttacttctggttcacaagttgttttagatcttttttctcctcctcctcctcctcctccttcttctacaattttctctccttcctttttatgtgccccattaacactttatggtcctcctgccatgagttatattcctattccaaatatgggagttagaagaagttacagctccccagatattaattgtaattttgaaagaaagaatgagcatgagaaaagtggatcattaagtgttccagtcctgttagaaaaatgtatatatgataaaaatagtgagtctaagagatgtacaaatatttgtttaactatagagtctataattagaggacatgaagaaacagttaaacagaaagagaaaaagaaaaaaagtaaaaaatacgataaaaggaatataaaggaacaacaaagaagaattgaaaagaggcaacaagaagagaaagtagcactattaaagcaatatgaagaaaagttgcaagcattacagagtcaacaagcgtcacagcgtttagaagcattaaacaatggtactgatatgtatacattgtttagccaacaatataacgaagagcaagattgccatagggaaaaagaaaaaaaattagaagaattgttaatgttgcataaacaagagcgtgatattttttttatacctgtaagtgattctacagaaaaagggacagtagaaggtagacaagaagattatagtgatattaacaaagatagacgacattcaacgccttctatccctgtaacagcattaaatatttttatagaagatagttcaaaaagcacaccagggaggttagaacatcaagactcatatagcaatatatcaaatgagcctaaaagcttatcgtctgatttagatgtatataataacagagacgttgtaagtagtatccctttatcattaataaatccagatgaagaagcaactgttgaggtctcagcaagtgaaagtttaacagagacaagtattcaagtaggacctttcccaagtaaaacatcattacttaaatattttaatagagtcatgaatgaagaaggatttggctctatacaaaaatattatagagatgatttgtatcttcctggttgtgctgtttatcagacagctaaaaaagaacacaaaagaaaacattctggtattcgactcccatggctcaagagatttaatctttcttctaaaacaaaaactgatcttcaagatgagagtttacaagaaagttcgcctccaaaatcgttaagagaggatggaatatatccaccgcttcttcagcataaacgtcctagtgtatattatactaaagaagtaggggcaggggatgatacaccacactcccttaagcatgtaaagtatcgtaaaaaacgtgtaggaggaatactacaatcgccagaaatccctgatttttgtaaaattgaaaagatttttagaagcctaccttctagtgaagaagagcaggaaagcgaattatgtccatcaggccctcaagggaaaatatatctttttacacttgggacacaaggctctgaacctggatattgtattatgagagatcctttcgaatccacttcatgttactatccttctggctctgacgcaaagagtgaaagtagtgaacaaggcttttattcttctaacctcgaaacagagaacaatacttttttgtttaatagagtatctcctccagaggagttacaatatggcaagaaaaaatctacgttaccacttcagaaaagaacatcctgtaaaaagaataaaaagtggaagtcttcatatgttgttgacgataaacaacgagctcaaagtaaaatggagctacagaagcatcaatattatataactgactgtcttcttcgattagagaagttgcataagcaccaatatgaagtagcaaaaaaaacaggagatgacctttgttctttagaaaagaagcaagcaaaagataaagagaggctccaagcaacacttaatgaacaatatttagaccttttaacaaaacatcaacagttaatagcaagaaatactcatcctagtgaagagagtttatcagaaatttctgaagggaatattgaagatgctgaaagtagtgagtctgacttagaaaggaagcatcaggctaaaaagaaacggttaaataaaaagcttaaaaaactattagttgaaaattatacaattggtcggaatcaccgacaatcagttgaagaaactactaccaaaatagataaacgtcatgctcaagaaagatgtcattggactactaaaaaaggccctttttcacaatgtttgatgctacaaactgaggagttatgggcattttataatgaaaaagaaaaagaaagagaaaaaatagaagcagaaaaaaaagaaaatcttaagaaatataagcaggaaaaagcagccaagcaaagttacttggggtggctatttggatggaaaaaagcagcgtctgaatcagaaaaagagaaaagttctagtgaggactttaaaacatcttcagatagtgaactagagataaaagaggttgttagtctttctgataaagaacattcagagtttgatcatagtgataattatgaatacgataagagtaagcctaaatgttatataagtacaaaagaaagaaataaaagacataagaagagtctacaaagagatagtaggcttactgctgggttatcattaggtgctccaagacaaattatgtaccaggacaaaaaagatgaaaaatcagatgatgataaaaaggtatctcaaggtaacgaatctcctcaagtaacaaaagaatctacagtagatggtaaaaaagaagtatctgcgtttgaagagaaccttaaatcagatgaaggtctatctgtaggcgatataacatttgagctttcagtattaagtggtgcaacaggaggagatgaagaccctcttggtaaagataaaggtagtcatgagcaggagaaggaacagaagaaggatcaaaagaaatggtctgataagaaaaaaaagaaatggttaacgtttaaagctgaccaaaagaaatgtccaattttaactaaagaaaaatattggtctatttgttgtgataacttgttagaattacataatcgtcatgaaaaggaatataaagaagcagagaaaaacgcatctaatatagagttattattagagaagcagtctcaagagcaagaatgtcttcgttctgaactcgaagagttatggaagcaaacaagagaagcacaggcctcttctagtagtgaaagtagtgggagtatagtttcatcagatatacgttcaagaggtgggtatgatatagaatctgatgtagatcaagaaacaagcaataagagagctagagataaacaaataagtaaacttcaaaagaagcaacaaagggaaagaaaaacattattggcaatgcagaggacaaaacaagagcaattggatgaaattcaggaggaaagaagaaggaaagctaagaggttagggatgtctcttgtagagttaaacctaatgcagcaagaacagaaagaaatgttgcataaccagcaacaacagcaagttaatagattggtagaaagacaacgtcagcaaatgaatgaactgttagcttcattacatcagccaactatgtctgaaagtactatgtatacaagttgttatagtggaatttttggatatttatttggttggggttcacaaaaagtttctagtgggaaagaggaaaatgatgttgaacaaactccagaaaaaatcactgaagagaaggtgaaagctgttgctgggattggaactttaggaagtgatgcagagttagaagaaggtatattttctgatggagcggatttcagtagtactattcttcaagttatgtctgattcagagttgagtaatgatatagaacaagtaacagagcaggtagaatataaaggtgtagtaagtagaggttctgaatgtgatgagataggagagcccatggatgaaagtcatgttcctgaaaagattatgcgactttttgagcgggcaacatttgtagataaagatagttctagtggaaaggaaggagatttttcttcagaagaaagaaaatctagttcttacagaaatcgttattacggagttgaaaaacgaagaaaactacggaagatacatttaaaggagaaggcacaattagagaaacaattaaaagaaccagaagaaaagataagattacaattagaacaaagacagcaagagcggcgtagaaaaaatcttatgtttggttatcatatcagtgaagattttttagataaactggaggaagatgaatataaaacatcatttgaaccatttaataagttacgtgcagagttggagcagaagcaagcacaagaaaggttgtctcttcaagctgcattaaaaaaagagtttgaggagagctgtcaacaagacagcgaagatatttctgatccagaggttaaacagaaaaagaaagaagagcgagatcttcttgtagcacttattgaagaagccgcaggtgatatacaagatgtagaagaatcagaggaagaatacattattgaatggaaaaagaatgaaagagcaagacgtgctgccttattagcttctgcaagagagtctggaaaacctttatgctttcaatttacagcacaatcttcttctgcaaatgcagcctcatcaatgcatggtagtcaccctgaaacacaagagggacagtctagtgataaagctagtgccacaacagttgaaccttctaatataacttgtccaggagacactacttctacagcccttactaaagaaacatcatcagttctgctacaatcgtcttcttcaagcatagtaacatcacaagatccagaagaaatacaacatactgatgaaaataaacaagatacatctctttttgatggtgagaataggaaaaaagagcaagagaaggatagtacacctctaggcactggagtgagtggtggatatcatgatgcctcagatcattatgggcaagggagagctggtgaaggcggaggaggaaataatgatcctccagtcccctctgattctacacagccttcttcatctacatcttctactggcgttcaaacatgccaatcttcattgatagaaaatgctcaggacagtagtcttcaatcttcattgttaggatatctattaccatccagtataactgataaaaatatctccactaaaaagagtacgcttaaaacagaaggcgtagatcaatcagttagctcaagtcgttgtcctgaggctctaactgcaagtgtaacttctttattttctagttcatatttgaaagttttatttagtggctggggggtaacaaacgttgaagccgctgtaacttctgatcctaatgaatccaaaaataaaaattctaaggatatagatattctcggagagaatagtggaaatacatcaatagaaggaaatcaagattctctaagtgattcagatggatctggtcaaagtcctagtggtgctacagggggaggttcaggtgaaagtcttggagagccagatgatgataaggataaaaaggagtcatctggacataaaaagaaaaaaaagaagaaacataaaagaaaaaagaaagaacaggggactagtactgaaactcagacacaagagcaacaaaataaagaaagtcaaacaagttcgtctcatcaatgtgaacaaataacatctgaagatagtcaagaggaaaaggaaccactagtcaagaaaggaggccaagatggtaaacatgacaaagataataatacagtaagtgatagtgaagaaggtgcttggaaacatcatacaataattgtcaaaggagatagaaagcctgaaggcaattatgctccacctccatggcttacacatcctttaagtttattgactggctcgccagtattagaagggattccattgtctcttgaagatgagcttgaatgtggatttgctattgatgctatgaaacttttggatgaagggttggaagaatctgccagtagttcagatatttttttagaaggtgtaatagagggagcaataggaagttctaaaaaggctcaacatatatctaaccagtatagcatattgaaacagagacaatctgaagccgttaaagctctgggaagaaaacataaacagcagctagaagagttaagagaaagtcagttacagaaaaagaataaaacacttagaaaaaatattaaggattacaaaaagaaaaagaaagagttacaacaaaaatttcaagaagaaatggaaaatgctgaccaagaaacaaaagagaagttagaaactatctgtaaagaggaggtaaacaaactttaccttacatgtaaggaagacagtgaggctcaagcttgtagcctttaccgtaaagatggagatcaagtagaagtgcttattcttcaacagaaggaagaatatgaaaagttgttacaacaacagaaagaagaaagaaaacaatatagaggaaataaacgagcattattacagtctatctcttcaaccatagggttacaacaagcagttgtccaacaacatgagggtacagcagcagtaccacaagatacatttgatagtcaaagccaaggaactacaaatagtagctggatgtttcttagattagatttctctgataacggagaaggaacagataatatgttcccatttgatccattaccaagggaggtacaaggagcatcctttacagatgctacaagtgaagaccaagatgttgatgaaatagcccaagaagctgatgaagatttagatagtaatggcaacagtagtgaaagtggtgatctgtttgatttctcagatggtgattatgaagatgataaagatgatgatttgataccaagttggtttcctctccatgatgtaggaatatcttatggtgatgcaaaagggaaaggggaagaagaggtaataggacaaccaagtagcactacagatattattacaggtgctataggaggtgcagatgtagttagtgttatagcaagttctactgcaagttgtggaggaggagaagaagaggtagtagttaaatccaaagaaaaagagaagaagaaaaaaaggaaaaaaaggaaaaaaagaactactgaagaatatgatgcatttgtagaaaaacaaaggcagtatatagaggattgtaaaagaaaatacaatgcagcttatgagtgtttaaaagcaatttgtaaagaagagcataacaatgcaacatcattagaggaacaacaggaactagcaaaacaacatgaaagaaaatttggggcactttctcatatgggaatggctcaacatttatttttgcaagaaaaacttgggaaaaagaaaaaacgttggttaaaaggagaggatgtttcatctgaagaagaatgttcactttggtgtaattttgtgtttgaaccacgtggagatgattcagatacaatatcttcagaagatgaaaccaatgtagcagttgaagtaatcgttgatgctggtacaaacactgaaactgatactaaaggacaacctaaagaggtcagaacaggaggagagaatgatcctttagaaggtgaatctagcggtacagtgtcttctaaaagtaaagagctgcaagaaaagcatgagtgtgagatacagtgtttttgggaagaatataaagaacaactagttacattgcatgataatcaagaacaacgtcttcaaaagtggataaatgatggtaagccagagcatgatttaaaaaatacttttggagaagaagaagcagcattacatcaaacacaaggatgttttttaaaaagtttacaagaaaagcataaaagagaagaggaagaagagcgtagacaaaaaggacaagaggatagtggaactagtttagagcagcctacaagcaaatctaaaagtaaggttttgcaagaaaagcatgcaagtgagatgcagtgtttttgggtaggatataaagaaaagttaactattttacgagaaaagcaaaaacagcatcatcaagagtgggtagagagtggtaaaccagaagatgagttaaaggatacttttgaaaaggaagaagaagcattacatcaaatgcaaaaatgtcttttagcaagtatacaagaaaagcacaaaagagaagaggaagaggaacgtaaacaaaaagaacaaaaagataaggatagtgagtctagtataatacaaggcccattagaagagcagaatgaagaaacaccagcctctagggactctataacatctagccaaggagatactcctcatagggaaaacacttcattagtgacttttaaagagttaggtgttgaatcaggtgaagaagagataaacaaagaagataaaaaagattcatctgaagaacagacaagtgaatctaaaagttctaatggattattgcaaaaagtaatatcctttttccagtctgtcggaagtagcttcaataaagaagaaggagctgttgggggaattgttacagagagttgttatgtaaaaagtaaagaacttcaagaaaagcatgaaagtgaaatagaatgtttttggggtgaatatggtatacagtgtagattattacgagatttccaagatgctcaacgccaaagtaaaggcttaagaaatactgctgaagcattggaaaatcaattagataaagaacgtgaggattttcgtaaaaagaagaaaaaagaatggcagaatttacaagaaaaacataagcaagaagaggaagaagaaagaagacggcaggaagaaggacaaccttcaaaagggggtatatcaggagcaaaagaaaaagagagtgatgagttaggagatgagacagacggagaaaaagttttttcacttactttttttggtcctcccacacaatttgatgataataatgccccaccacctttcccatatgatcctcctcaagattccccacaaaatggagaggattctagcgagattaatccaaatccagaaggttcttctcagcaggaatctccctccgaaagttcaacagaagatacatcttcatcatctgaagatgaagacatagttacattgctttcaggtaatataaagcaagctcgtcctatagggcaatcaacaataacaacaactactactcttgttacttctgtagaaggagctgaaggattatttccaattgaagaagagacagaacaaaatttagaggatgtacagggttcaggcgctactcaaggaatggtaggattatctacgattgaagaagaagtggaggaggctcctggagcttctgaagatttagactctaatcaaggagcaacaggagaggtctcatctccaggaagtaaagaggaagttgtttatttatcatcaagtggagaaagagcaatacataaatggcttgaatccagtatatctatgccagtgactatggaagaagggtcgttatcacaaggtggaggaaaaactagtactctttattctctaatggtttcatctggcattctatcttttggtggtgacggtaatggagaaaaggctagttcttcaaataaacaaagtaaaagatctccagaggaatgtaaggcttttgaagaaaaacaagttcaacaacggcataatttattacagagtattgaagagaaaaagaaagaattacttttaacctttgagaaacaatgtcctcctgggcttccttcatataaaaaagacaagttagtaaaagaacaaaaagtaacaatggaggatttcctctgtgtaagttgttaccaatatgaaacattagaacaaaagcaaaacgagcaaagaagacgttgggaagaaggtgaggacgttgctgaagaagaagatcttattttgttatgggacacactagataatgaggcagaagaagggactaaagaagagcatgcagaggttaaagtagagggagtagaaggagaagtttttgatggaatatctgaagaagataagccaaaaaaggatgataaagaagaacaggaacaaaaagcaacattaggagattcatctggtgaaaccatagaagaaagtcaacagccgcagcaagaagaagaagaaaaaaaagaaaatagtcctagtgggtctaatgaaagtccttcaccacagcaggaagaagaaagtgtagatgaaacttctagtgttgttacttcttcaccattgttatctataaatgaagttaagcaaacagaagacaaaagtgcaaagaagaagagatcagaaaaagagcttgatgattttaacagaaaacaagctgaacagaaggattgttttttaggacaggttcagcaagcaaaaaatgaattagaagaaaagtatggcgaagcttgttgttctgcttcattggatgaactgctagaactagaaaaaaaatttataaagcaaaatcagaaattagattctactagtgaagcccagtttaagaagttggaacgtcgtcaagaagacaagagaaatagatgggaagaaggtgaagatgtttcttcagatgaagagatatgtttcatatggtcttcagatgagtcatatgagaaaagtgatagacttcatgaaaagcatactcaagaactagctgacttttggcgtaattataagaaaaaattgtcgacactaaaagagattcagcaagaacgtcgtgatcagagcagtgaggatagcaaagagaaacaagcaatggaagagatgtttcttgcagaacaagaagctatgtataaaagccagatgaacacttttgctgagttaaaacaacaacaaaagaaagaagaggaactagaagagttaggttggacattggaaaatatgcaaggagctgttggaggtgtagagccagaggatgaagataaaattgaatctcctcttgatagaaaacatcaacaagaaaggaagagtttttgggaaaaatgtagggttgatagtaagtttattgaacaagaacaaagtgaaagacgagatcggtggagaaaacaggggaaaccaatagcctcattagaagagatttttattgaggagcaacaagcagtttttgaaacaaaaatgcttttttgggaatcattgcaagagcgacaaaagaaagaaagagaagagaaagaaaggagagaagaacagaaaaggatagcagaattagaaaaacagttatctccattttggaaggcttttaaagatgatcaagctcgaatgagagaaaatcatgatatgcgtcgtaaagaatgggaagaatctggaaaatctctagtagtgttagagcaactattggctgaagaagaagaaatattttttcaagataagatgcagatgttagaggagttagaaagaaaaaaatactttgaagaaaaacaaagctcaaggcaaaaagaacggcaaggtaggttttctacaaaagatgatagtgatgaagacgaagatgatataaggtatcatacagtatttgtccaaggggagggagaacccccagggaatgaggcaccaccacctctcccatttccccctcctgttttaggtgatagtggtgaaatgcaaagtggggatactggtggtgcaggtcctccttctgaagagctttctcttgggaatattttgtcgtcttcagatgaagatgataatatcatagtctcttctactgaaagtagtagcagtagtagtagtagtagtgatgaatcagatgtatctagttttgaaacatcttcagatgaaggtccagattgtgttgatggtgtctatggtgctgtcggaggtgaagaacctgagaaaaagaaaggcaacggctatcataagaaaaaatttaagaaggttaagaaaaaactccataacgttgcattaaatcaaaagcttaagaagctaaaagataagttgcaacaacttgaaaaggagtaccataaatcaattgcagactgtcaaaacaggtatcaagacgttaagtgtaacctattgatggctcaagcagaagaattgattggtaaatctagagaagagcaagatactctttgtaaaaagaatagtgagaaaataaaaaaaattgaagatggatatcgtcgtcaatatgaacaattaacagaaagttattacacaaagaaacaggtagtattgaataagttgtctgcagtgatggaaaagaaggcactgcttaagcaaaagatacaagaatatgattctgttgacggtaaacatagagtttctaaagggtataagaaaaaagctagtaagttaaaaaaagagagtaaaaagttagaaaaagagttggaagcacttaaggagcaacaaactaaagaattacaagattttgatcagaagagtgacgcatgtagacagcaaattttattttttcaaaaagaagaagtgaacagtataaaagatgcaggaggagacctttgtgctcttcaaaacaagcatacagaagaggactgtaaagttgaagagttgtttactagtcaaaaggaattattaatcaaagaacatgaatcccagagaaatgagaaagaaaaaagaaagaaagagttagagaaacaacaacaagctactagagaaaaggatacccctacatgttatgagcatggcatagataatatagttaagcttttagaggaagagatcgaaagtttagaaaaagagttggaagaacttgaggaaaaacaagaggaagagtggaaagcatttgagttacaaactgaagcttgtagaaagcaagtcctatttttgcaaaaagctaaacccaaagatagtgccagagaaggtggggaagaagatcgcagagcctttgaaagtatggttgctagtcagcaggaattgttacttaaagaacaagaaagacagagaacagaaaagttaattagattaacagaggcaaaggaaaaaagaaaacagcataaaaagaaacagcaacagaagcaagaagaaaaagaaagagaaaagcagaaaaagaaacaggagcaagtaaaaagggaaaaagaaagagaattagagagacaaaaacagcagcttaaaaaagaacatgtacaagatagaaaatgttttgttacaacttttaatttttgtaaagaacaactgcaaaggttacatcaagaaaaccttaaagttgtgcatgaaaagggtagcgatgatacatccttgatgcaggaatatgaaaaagaaaaagagtgttttttaacagctcaaaaaagtcagtatgaaaagttgttacatcaacaacgtcaagagatgaagaccttaattcaaggttcacatggagctgatgtttcttcttctcaaaaagaacatgaaaaaagccatgctaagacattagaaaaacttctgcaaagacaagaatcatgtcttaaacaattagaagatgcacaaaaacaagaacgtcaagaagcagaaaaattaggtaaagatctttcaaaactagatgaaaagcatagaaaagagaaagaagacttttttgaccatcataaaggaatattagaacaatgtttactccaaaatttatctgagactgtttgtcttttaggtagagatgaaagttctagtgatgaaggctcgtttgatcttgaaggtttttattctccagatagatgtatgggacgagtaggtgaacccatatttacatttgttggaagtgattttgttagatcccaagaagcttctggtatttatccattggaacaacaagtagaagcatttgatgaagtagatactggtcgaaaaaaagaagaagatagctatacagataaagagaagaaaaaaaagaaaaagagtaaaaaagaacgtaagttagagagtgaactagaaaaattaaaaaaagagcaagcaaaagcaaaaagtgagtttgaagttaaagtaacttcttgtagagaagaacttttcaaatcacagcgagatgagtttgttactgcagagaataaaaaacaagatttaaaagcattagaaaagaagcatgaggatgaaaatgtacagtttacatcaatgtgtgaagagcagtttcagattttgtgtaagaatcaagaagaagaaaaagtaagaaaagagcaagaattacaaaaagcaaaggaagatcataagaaaaagaaagaaaagaaaaaggagaagaaagaaaagaagaaagaaaaagaaataagtaagctacagcaacaacacattaaagctagagagcaatttttacagagttataaaaattgtaaagaaaagatggagatgttggatcaggaagaacttttaatagtagaagcctctggaggtgatgttgaagcaaaggtaaaagagctacaagcacaagcagaaattttcttcaaaattcaaaaagatcagtataagcttttattccatcgtcaagaacaagaaatgaaggctcttgaagcaagtttttatggtgatgaagttgatgctcctactggcgctcgatctatagaagaatttcttgtagatcgaatgttaaaacctcaattatctgaagatagtgaggaagaacttaaacctcttgaagacccttcaactttttataatccatctaagtatggagagggtagttttatattctttacacaattatcttctgagcaaactagagatcaatatggctcagatgatgaaaatggatttcggtatcatacagtaattgttcaaggagagggggaacctaaaggggatgaggcaccaccgcctttcccattttattcttttgtttcaggcgatagtggtgaaatgcaaagtggggatactggtggtgcaggccctccttctgaagagctttctttagggaatacttcctcttcttcagacgatgatatcataacttcttctattgaaagtagtagtagtagtagtagtagtggtgatgaagcagatgtatccagttttgaaacatctttagatgaagggtcagattgtgttgatggtgtctatggtgctgttggaggtgaagaacctgagaaaaagaaaggcaaagcagttgatgatgtagatggtggtcgaaaaaaagaagaagatagttatacagataaagagaagaaaaaaaagaaaaagagtaaaaaagaacgtaagttagagagtgaactagaaaaattaaaaaaagagcaagcaaaagcaagaagtgagtttgaagttaaagtaactttttgtaaagaagaactttttaaatcacagcgagatgagtttgttactgcagagaataaaaaacaagatttaaaagcattagaaaagaaacatgaggatgaaaatgcacaatttacatcaatgtgtgaagagcagtttcagattttgtgtaagaatcaagaagaagaaaaagtaagaaaagagcaagaattacaaaaagcaaaggaagatcataagaaaaagaaagaaaagaaaaaggagaagaaagaaaagaagaaagaaaaagaaataagtaagctacagcaacaacacattaaagctagagagcaatttttacagagttataaaaattgtaaagaaaagatggagatgttggatcaggaagaacttttaatagtagaagcctctggaggtgatgttgaagcaaaggtaaaagagctacaagcacaagcagaaattttcttcaaaattcaaaaagatcagtataagcttttattccatcgtcaagaacaagaaatgaaggctcttgaagcaagtttttatggtgatgaagttgatgctccttctggtgctcgatctatagatgaagtcctttcatctgaagatagtgaggaagaacctaaacctcttgaagacccttcaactttttataatccatttaagtatggagagggtagttttatattctttacacaatcatcttctgagcaaaccagagatcaatatggttcagatgatgaaaatggatttcggtatcatacagtaattgttcaaggagagggggaacctaaaggggatgaagcgccaccaccaccagtgaagcttcgagtaccaccttctctaactgctgacttggaagacgttggagatggtaatactgaggttgactctagatgttttaatcagggtgtaactagctcagggatcagtagtagtcgtagtagttttactactgaggaaggatctcaaggtagtggcagtatgtcatcactagttcggcttcaagtatcatcttctctaattactgacttagaagacactgaaaatggtaataccaagacaggtacacagcaatggttaggcaatacaggtaacgataatagttgtaatgagagtactcaatacacagataattcaagtcatcatagtagtgatgatgatggaacagatggtcatagtaatgataatattaatggagctgagggcggctcaggagctgcaggaggttcaggaggggcagaaggaggttcaggagggtcagatgatgataacaatcctccagatgataatagttctaacgaagaagaagaagaagagagcattcttcttgtaagtgaaactgacttaacagatacaaaagcagaagacggggatagtgaaggagaaggaggtataaaagatcagagaaagaagaggaaacataaaaaagttagtaaaaggaagcaaagacagcatgaaagacaacttttagagaaaaaaagtcttgcacatagtcaatggaatgaaaagaaaaagcaacaggagaaacaaagaaatagagcgttattgtttagtattcaaagaaaagaggatctttcagaacaaataagaaaggaagaacgagaacagcaagagtttgaatctaatcaacatcatgaaaggatattgttagaagcaaagcataaacgacaaaatgctgagcattctacagactctgatggagaagtccatttcccatctaaaagacccaaaaagtctcataagaaaaagagtcaacaagtaggcaagcaatcttctcaggtggaacaacaagtagagaaaaaagatagtaaaaaacagagggaagaaaaggatgttccatcatgtttgttaactgatatttcttataagcgtttattaagtagttctcagcaggaggaaaagatacattgtgtaactagtcaacaaaaagagaaagaagagcttcagaaaaaacaagagaaagaaaaagaagaatataaaaaagaagcagcaaaggtacagaaatgtcttgctaaattgagttctcaacaacaaccaggtgcaagtagacaacaaaaacaagaggaagaagaaattcttcagcagcaaacgaaagaaggcaaccagtatattttaaaaagcaaggtaaagctaaataacaaacagcttgcagagaaagataagcttatacgaaaacatcaagaagagaatcttaaactgtctaagaagcatcgcaaagaaaaaacagaaaaagaaaagaagagaaagaaaaaggaagaaattaaaaagaaaaaacatacaataacaccagaagaaaaggaacttcaagaatattgttctgggcgtagaagaactttatattccatgcaaatagacgagagagaccttttagaggagaaacataaaagagagttaggtcaaattctcgatatggaagaggttgaggttttagaagagcagcatgaagaagaagtaaaagagctattcgagaaacaaagtaaggatagagggttgcttgaagagcaaataaaaatattacttcaacagcaatcctcccatactacaagtggggatgagaaaaaagaatgtgtagaatcatcagatgagtttgatagtatcccttctagctccacttattatgattctacaagctcttcttatagtactggtgatttttatagttctatgccttcaggtgagcctgaagtggaaataggtattgaaatagatgaaaattttggcgtaggcactagtgaaaatagtaataatacacaagatgaaacacatcgtcctattggtggtgcacgaaaatatcagcctaaagaatataaagatgtatctgatacatcaaaaaaacagaaaaaacttactagaagcactccaaaattaatgcttctttcaaaaaaagaaaaagaagcattgagtcataatgtaacacaaagctatcacaatatatataagaagatacgaaagaaagagatagaacttgaagatgtattacgaacagagcaggaaaaagatagaagaggagaggatgctgattatcagttaattcttcttttaaaagacgaattacaacatctattgagtctatttgaacagacccttgaagaagaacgtcaggcattagcagcagttgatgcaatggatgaacagacagaacttgaacaacaatcaatagaagagtcagaaaataagaaaaaagaagaacctaggaggaaatcaagtctattagaacgtatctttaaaaggaagcaggaaggagatgaaccatctaaaaaaggaaaagaaaatcatcatgaaaatcaaaaaaggctagaggaagaaccattagtaggattaaagaagaggcctaaaagaacatcaacaacaagtaggcttagcttaacattaacctctataggagagagcaagatcccacagtgtgaaaaaagtgatgaatctaatcttgtgggccctgttgtttcattttttaagaaggagttacgaacgcgtaaaagttctatgatacatggtgtttgttttcctcaaacaggaggagttcttcaatcactagatgttaatagccaaaagaatttagttagtagagatgatagtaaaaaacttgaatccagtggtgctccaggtggaggtgatggatcaggagatgatagtcattttaaaaaagataaaggatctaaaagagatggtagttctgattctaaaaagaaaaagaagaagcatagccacaaaagattctgtagaaaacgtttagctcatgaacgaaataaacttaggaggaaacatcaagaagaaaaagagttatataaagagcagtttacacgtggggttcaacaagtatttgctctccaggacaaagagcgtgcagaagtagcaaaaaaaggaggtgaccttgaagcattagcagaaagacacatgcaagatgaagaagagcattatgtaagaaatagaagagaggtagcagaccttcatgataaacaaaataaagaacggtgtagactataccttatatctaaaggtggaggagaatctgcaaatactacagtgacaagtgatgaaagttctgtatcagaaattttagaaagtggcagtgaagctgccgtatataaagaaccagtaactcaagaagttgaagaactgagaagacaacaacgtaaagagttggcagtgcttatgttctgttgtgaggatgaaaagactgctttacagacaatgcatgagaaaaataaagaatcgttagttggtacaatcttgttggaaacattagaaaaagttcataaacaagaagaagacgatcttgctgcagaacatcaaaagaaaaaagaggaactattaaaaaagcataaacaagaacaaaaagatcttgaaaataaacataaacgttcttcaagcaaacgtggtcctaagagaaaattacatcctaaagttaaagccgttcttttagaacacaaacaagcaaaaaatcgccaaaaaattattcatcaaaaccgtaaaactcatttggagaaaaaacaagaagaagaaaaaaggatgatatctcaagggcaagttccttctgtacttttaaagaaagtcagtgagtaccatggagggcaagaaggtacatctttagtagaacttgtagcattatatcatgaaggagaaatgagtgccctattagatgaacaaaaaagacagagagaagaaagggaaaaaagacaacgtcaagatttaatcagagctaaagtaggggctttttttactcaacggactccttcagtcagaaaaaaagagggtctatctttaagccaatcttcactacatgattcttcaccccaaaaatatacacatccaagccataaaacatgtggtcgacttgctgctgaacaagctatagaaaaaggtttctttgagaatcataaggcaaattgtagctttatattgggaatagagcaaaagaaagagcttaaacaattagaagaagagtgcgaaaaagagcttaaacaattagaagaagaatgtgatgcagcatatgcaatatttcttcaacaattaccattcctttgtgatgaagatagacaaacacaagagcagcacttcgtatcccaacgtcagcagatagaaaagtatagggaacaacaaaaagaacaattaacctgtttacaacacaaacatcaacaagaagcaaaagaacttgagaaattattagaagttcaggcaaaagaactggaaaaaaggcagaaagaagaaagacaaaaacaacgagatgttgtttcttcatatccagagagaaaagctcagcaagagcgattaataactcagtctaaacacctgacggctcttaaagaagcattaagtgaagaagattctatctttcaaaaagacctcacttcttcaacaatcgtaaaacagcaattgtcaaaggttgaacaacagaaagaacttgaagctttgcaagaagattttgtgttagatctttgttttactgagtcagattatacaagtgtttcagaagagagttcagaagaatcttctgtaccagaaggtattagtagaaaacctcatggacctagtggaggtggattcagacatcctaggagagagataagtagtagtgattcagatacagagggcaagtcagatgatcaatctgttagaaggatagaacaagaaatacaaacagaacagacaggtccacaaggtacagaagaaagtcaaacatatgctgtgcaacagaagacaagccaatttgtagaagtgaaagaagaggaaattcaggttctagaagaaaaagtacaaattgtagaagagagaggagacagtgataaagagaaagtcttaacaagagaagagaagaagaggaaaaaagaggaagtacaaaggaagcatgagaaagaacttaatctgtggatgtcacagtatgaaactacagtccaaaagatagagcaaaagtataaagaaaagaaagctaatcgccatattcttggatgtacattagaggagttacaagaacaggaagaaaaagaatctaaagtagctgttgggaactttactgtattattagagaaaatgagggaaaagcagcaaaaagaattacaacaattcccatcctcagatgaagatgaaagcgatgtggatagaagaaagaagaaaaaagttataaaaacaaaagctgaacgaaatgcacaaagagagcaacgtaagcatcatcatactcctcatccttatcatccagaggagtcaacatctcatttagttttagatactaagcaaatagtaacactgacaccaagtagcagtgatcaagaaacaccagttcaatcaaaagaaacagctacaaatgaaacacctattccatcactacctagtacggtaaaaggccttacactagaggaagttacagtaactgtattacctcaacctacacaattaagtagcctcttaagttatttttcttctgaaccattacaagaacaaccatgtcaggtagaggagcaacaagtctcatttgaaagttctcaagtacaagctagtactgatgaggcaacaatagatccagaagtacaattagttttggatgagtattcatcaaaagttgcttgtttacagcaagagatggataaaaaattacaagaaatagaagaaaaaggtacagatagttcagcttcatcagatactgaatggtcttggcctaaaaaagatatgccaagagaaataaaaacactcaaaggtagtgatagtgaaggaaaagatcagcaagaagtgccaaagattccttctgcaggtgcacattctttgagtagtatggctgaatctgaagatgtgggtgcagtttcacacatagagaaaaagaaaagaaagagacataaaaaacataaaaggagtcaaagggaaaaaatatctcgagcaaagagagctcttatggcacaatattttgcaaaagtaacactcttaggacaagaatgttcagagaaagtaagtgagattcaagaacaaaaaaagcagaaatgtgaaatagaagaaaagcagagaaaagagagagaagaattttttgatcaacatcaagcagcaagaaatgctcttttagctaaacaacaacaagaactcataggagtagcacctgaggaagttggaccattacaagataaacatcgtcaagaacaacaagcacaaagtcgacaatggggcttaaacttacatagtttaataaaacaacagaggaaagagagagggcttagttcttctatatctagttcatcatcagatgaagacataatagatgaaggcagtcaaagtgatgatcaagaagatagcaaaagtctatcgtcacctatatctccaccaccttctcctcctgtatctggtgcagactcacaatgtataggaggagcatcttcttcagacactgatgctacaatgaagtctgatggtcataaatcgccagaagtcccagtatcatcagataaaaaagaagaaactggtggtaatcaatcaagtaaagttacaacttatttactttctgtctttacaggtaaggggggaactgctgctggcgctcagtcttcttctagtgaacatactggtagtaaaagacaacaaccatctggttcagatcaaacatcgaaatcaagtagacaagggccttctactccttttgaagggcaagggacatctggagtagagggtgcttcagggggagcaggtgatccaggtgatggtgaggataaaaaatctaagaaactagatgatagtcatggtaaagatcaaaaaagttctctaaaaaaacataaagataaaaagaagcatacaacagaggaagaggaagctaaaaagaggttacaagaaaaagttgaacagaaaagaaaaaatagagaactattgaaacaaaaatgtaaagaagaagaagaagcttttttaaggaatagagagaaatgtaaaaaacagtttcttcaagagcaagaagaggaatatgaggctgctagacagtcaggtaaagatttagaattgttgctagttgaacaacgtgagagacaagtagaattttataatcatcacgagagtcaacatgcaaagatgaagaaaaaacacgaggcgttacttaaaggaaagcgtaagaagaaagtcaagaaatatggaacatcactagaagaacaacaagcaaaagaaagagcagaggctcgtcagaagtatcaaaaaggtatagaggtgatggaaaagaggcagcaggaagaattagatgaagcctctgctcagggtaagaacttagaagatattaagaagaaacatagacaagaggaagaagatttttaccgtgaacagatgttaggtgaattaggaaacctgcttcaacgacaaaaccaagaaagacaaagtgtagggttacctccaattgaagggagctcaagtagtggtgtaacaacatattctgatacagaatatagttctcttgaaatggatcttgaaactaaagaagaggtttatacaagtggaaatgaaagtacagaacaagaagtagtaacagaacaagaagtagtagtaacagaagcagaagaagtaacagaggaaaagttgttagtaaaagatgaaagcttttcttatcaaggtagtcttacagaatatctttctcaggcgatcccagaggaagtgaataaaccttgtatagatgatacaagtagcagtactagtactactggacggaaatctagtttttttgaaaagttcttttcaaaagttaaaggaagaaagcattcacaagaagaaactgaaagtaagtcaggcactggtagtacggcatcatatggttctaagtcttcaactacaatgcagaaagatgaagtacaacagcattctgataggaaattaaagcataaacagaagaaaaaaagaaaaaaagaaaaacaattggaagaaaagcaccagcaacagcagcaagatgtttataaagactttaaaaaacgtcgtttattaatggagacaagacatcagaaggaacttgaagaagcaatctctaaaggtgaagacataacaaagttacaagaaaaacatcatgaagaagcttcagtacaacatcctcttttattttctcaggctatgagtgtattgagagaacaacaaaaagttgaaagagaaaatcttatagtaagttcaggtgacagtgataccacctcagatacatcagatttagaggagacaggtgtgtcttctaaagatcactctccagagaagaaaggtggtaaagacggtaaacctgatcctgatggaggaagtacttccagtagtcaatatcaaggacttgtttattatgtaacagcagattcagcccctgtattcccatatggtagtgaggcatcattacctttctcttcagacaagggtaaaaatgaaggtaagcaacagacattacaatgtggtgatagcggatatgagagtgataaccaagaatctggggatggttctggaggtagtagtactgaaaatcaagtatgtgtgtcgcaagagtcaaatagttctttaggtggagggcctcattctgacgatggatatgaaagtagtgatgaaaataaaaatggaaaaggtagttcaggtcctcagtcagtatgttgtgtaaatggtgttggagcaacaggagctgctaacgggggtgggtcttctgtagcttcgggagttggttctggaaatacaggatcttcaggaagttcgtcttcaagttctggagtcagtgggaatgttggtactccaggcaatggaggtagtagtgcaggtagcccaggtggaagttcaggaagtccaggtggatcaggtggaaacgttggaggctctgggaattcagctcctggaggaaatggcttagtttccgttacaagctctatgggtaatggctctaaccccccagatccaaatgatcctttaacaatgtctttactagcagatgatgaagatacactttcagacgaagctaaagaagaattgttggtaccattagactataatgaaaatgctattatgggctctcttgatggattacaacaggtccttcatacacctgcaaagagtgttcagagtgcaatgagctcattagcattacagtcacgaactggacatatgtctccaactaaacgttttcaggcatttgcttctattgaaggtgaagtgagttcacaatcaggaaatcaaaatgcatatacttctcagtttggtattgttattcatcctgtaccaaacatacgggttggtttagcatacaactatagtagagatcatactggtgacttatatggtatacgttctaaaaaagatattggttttgcaaaaagtaaagtatcgacacatattttgtcatctatgttggtatggaatgctgaagattcaggttttacagcacatataggtatttcatatggtttagggcaagtaaaaaatactcggtatattagctacttagatgatgttattcatacaaaaggacgttctgacacctccatacttggaggtattgcccaattgggatataccttacggttaccaaaatttcttcttacaccctatattgaactatctactgtaaatgcttggtggaaagcttatggagaagagtatggtctcttggcttctgacatcagtagaggagaagaaagaatatgggaaaaaagtatgggcttacgtacacgctggagtattacagatgacattcaatggcgagtatggagtaaagtcattagtggacaaagaaaaagtaaagaattaacggctactcttaaggctccttttgttccttgggaaacatctactcctgataaaaagaaaacgtattctcaactagagttaggtactgcatttgatatacaactttctaagcagtttggcattggtgtaaatggttctattcgtttcagtaagaaaaaagaaatgagacaacaaaacgctggtatgcgtttttggtataatttttagctaaataaaatatattattcttatgttttgttagtagaatatactttttcatatagataatgttttatctctatatttgaatgtagtatttttatatgtaactaatagtatattactagtatttattgtatgtatatatgtatatcatttgaaaaactacatgtgtaaaagaaagattattagtaatagaacagtaatgtctaaagagtaatataatgtctttcttcacgttgtagtatatgttatatctattgttgatataagattcatctatatttttttttaataatattataaataatattcgtttttgatagaagtatgttctataagtagagtaaggaatataaaaaatatggttagttatattcgtttattaggaagtatatttttagtattagcaatttttggttgtggcgctcagtttaataaaccctctttacttgatgaaacccctatagattacagttctgtactttctgattacatagtagaattagaaaaagaaccacttcagtatatattactaaaaaaagaaaaattttctcaaatggagatatataattatcaattcacatcacaacattggtctccagataattttgtatcacctgctatatgggaacatcaggtagatatatatatccctcaccatccagtttcagaacgtgcacttcttatcatcaataatggtattaataatggtacattttttacttctcctaaagctccaactgattttactccagaagtattagaagaaatcgctcgttcaacaaaaactgtagtcattgctctaagtgatatcccaaatcagtatcttacttatagaggtgactggagatttcttaaggaagatgaaagtattgctatgagttggtctagttttttacaagatccagaaagtcggtacacaagacctctctatgtccctatggttgcagcagtttctcaggcaatgactcttgcagaaaaggagttacaagcattaaaaattaagcattttattgtatctggtgtgtcaaagcgtggatggacaacatggctttcagctattgctgactcacgagtagatgctattaccccgtttgttattgatgcattgaatactcggaaagtccttggacatatgtataaaacatatggaaataattggcctatagcattttatccatattatagatttgatttagataaacaactagatacagttccttttttcaatcttatgaatattgttgatccatatagatatttaggaacaccatataagtctcgacttgctatccctaaatatattgtaaatgcaagtggagatgatttttatgtccctgataattcaagtttttactatgatgatctccctggagagaaagcattacgttttgcaccaaactcaaatcatcatgggatattaaatttcacaaaacaatcgcttattccttttgtgaatagagtacaaaaaggtatttcaacgccagttttagatatttccacagagatgacggaacgagttcaatatgtgactgttcgtttttctgaagttccagagaagatagtactttggaaagcagcaaatccagagtcacgagattttcgttatgcctgtcgtgttaggtacatggaaacaccattacacctttctgcaacaggggaagttagcgtttcattagagatcccttctgtaggatggcaagctgcttttattgaagctacatttaaagatggttttgttgcaacaacaccagtgtatattttaccaaaagatatatatccacctataaaaataccacctgtacatggattattatgtaagtttgtacatggtcgaacctagtaactagtagttgttgtactgataatctaaaaggatatagatgcatgtcagcctttcatcatagaagatgtctgttataagtacactatctatgatggaaggggattatgatgagcgaagaagaaacaggatttgttaaaaagatagatggaatctatggtgatatccgtatagaactccatattggagagccatatcttaatgaagcacaagatatttgtattcctctattacgacgtttatatgttatgaaaaagaatagttctaaagtctccaaaaaagaacatcttcagtaaagtctgatggattaagtcgacctttaatatccatgagtacagcagagtttatatttttaaagcatgaaagcaactcttgaggttggagatgtaaatagattttatgaggaactgcaagaataagtgcatcaagctgtttaaataccgaaaattcttcaatgacaatttggtattctttaagtgcatcttcagcatcaacaagtggatcatgtacaagtggtgtaacaccaaactcttctaactcgttaacaatatcaatgacttttgtatttcttaagtcagagacatcctctttaaatgttaatcctaaaatgcctacacgtgccttattaataagtacattcttttttataagcagttttacacaagtttcagctatatattttcccatttcatcattaatacgtcttcctgcaagaataacttgaggatgatatccaacttcttctgcttttcgagtaagatagtatggatcaactccaatacagtgacctccaacaagtcctggacggaatggaaggaaattccattttgttccagcagcttctagtacttcaagagtatcaatatcaagtttatcaaagataatagcaagctcattcataagagcaatattaagatcacgttgtgtgttctcaataacttttgcagcttcagcaactttaagacttgatgttttatgtatgcctgcttgaataaacgttccatagagtgctgtgaggagatctgttgttgctttgtcgctccctgaaacaactttaacaatattttctaatgtatggatggtatcgccaggattaatacgttcaggagaataaccaactgtaaaatcagtaagatatgataagccagaaacttcttctaaaagtggaatacatatttcttctgttgcaccaggatataccgttgactcgtatacaactacacatccttgacgcatatgtcgtgcaaccatttgagtagctttgataagaggtgtaaagtcagggttacggtatgtatctataggggtaggaacagctataataatgatatctgcttgatggatatctgtttgattataagaaaaggatgcttttgtattatctaatacttcacttgaaatttcacctgttcggtcatattttctaagtaattcatgtattctacgtttagatatgtcaaatccaatagctgggaaatgatgagctagctgcattaaaagaggtaatcctacatatccaagacctactaccataacacagatatctttgttatataactgctctatggttaccattgtatttctacaaccagcttttgtacattcatgttttgtactcttttgtaggtcttttttcatacttttaactcctgatctctttcgtatctgacaattttatcattatataactgttaatgtctatatacaagaagtaggtgggagtagctggtatcttgtatgatatttgtttagtaataagagttgtctcagttaatactttgtcaacataagtagttactgtgtagtattactttaaaaaagtaattaattgtgataagatacctaaccataactaatattattctataggtgaggagatgagagttgttgctatcttgagcacagatttttgaaatattcaggcactattagagtgaggagaggtttagatacattagtagagggaactgattgatatattgaggagtctattggtgaggaagaagtccttgagttgtttcaaagtaagcattaccacaggtgatacaatgaagatttacaggtagtttttcaccacattggcatatccacccttgttgtttagcaggatttccatacgttaatgcatgatctggaacatcttttgtaacaacagagcctgctccaatgaaagcaaatcgtcctatagttataccacaaatgattgtacaatttgctccaagggttgcaccatatttgacaagagtgggtctagcttgttccattcttgggatgaatgctcgtgggttaaaaacatttgtaaagaccatgcttggtccacaaaaaacataatcttcaagggttacgccacgatatatactcacattattctgtattttacagccatttcctatctgcacatgtggtcctatagaaacattttgtccaatgttgcaagattttccaataatagtgaagggaagaatatgagagaagtgccagatggttgttccattaccaatagtgacattttcatcaacaatacttgtgggatgaatagtaatcatgaaagaacctctttcagtgtgttacagacaagttttacatcatcttgtgtcatatatggatgaaaaggaagagaaagaatatcatgagaacatgttgtagatataggcatatcctctgcctcataatattgatctgcaaaggctggttggatatgcaggggcttaggataataaatgtttgttggaatatctttttctgcaagataaatagcagcaatatcacgcatatctgatccaatacgtatagagaattgggcaaagacactaaaattacctggtgcaatatgtggaagggtgatatcttttactccagtaagttcttttgtataccatgttgcaacagtttgtcgtgtacaaagttcgttagggaaaacatcaagttttgctaaaagaatagctgcttgaagggtatctaggcgtccattgacacctatcctcacattttcgtatttatgttgtcctttcccatgaactcgaatagatttaagtatgccagcaagtttatcattatttgtaaaaatagcaccaccatcaccataacatccaagtggctttgcagggaagaagcttgtaacagcacaatcacaacctaagttgcaggttgattgatctttataggttgcgccaaaactttgggctgcgtcttcaatagaatagaggttaaactgttttgcaatattaaggattcgtgtgtaatctgcagcctggccaaaaagatctacgggaattactgcacgtggtgtaagttcagtttctagggctgttacaggtaatgggtatatagaaggatcttgatgtttaacagcaagtatagctttttttaattggtttggacacatagtaaatgtgaaaggatcaatatcgacaaaaacgacagtagctccaagcaatgcaggcatttctgctgttgcaaaaaaggtaaaagcaggtacaaaaatagcgtctccagcatcaatttcatgagccataagggccataagtaaggcatcggttcctgatgcacaacttatacaatgttttgatcctgtaaaagcagcaagttgtccttcaagctcctttacttcaggtcccataatgtactttccatgatcaagcagtgcttgaatacgtgactcaataactgttcgtatacgtttttgttgagaggctaaatcaataaattccattggatattcctttgctagtagcctttacatgtcgagaactgttagcttttaaagaacactttatggaaaatctatagttagttatgggataattttttttttgtgaaaaaatggtatcaacaaatattgttaaggggttaaaaggcgatagtcttgttatgcattgcctatggatagatattgttgatagataggtggctatagtcgatgaccgtttttcttgagcaatacaaagattaataggataaatgcttttgttttgttgacgtcctaaacagatagttttctctttagaagaggttgaatgaagagacaataactgattatgttccatgtacatttcccttgcaagatacgtcattgggtaataattatagcctgtgtatatcagtagtatcttgattcgatcacatatacgttaattttgaaatagaacattctttcatagttattttgtatatcaaaattgttatagttttgttatctaattagagatagcattctttttagagataactgtgtatatcaatattcaagaggaagagaaactgttattcggtctcttgctgatttgtatgctgcaatgagtacttcaagtgacttaagaccttcacgtccatctgtttcaggttcagccttgccacgaaggacatcgataatattttggtaatacaatggatgaccaaacccatatacagaatttgtttgatagcttacagatgtaacgaggtcgtcatattctttaggttcagcaaagttccatagttgtatttcattaacagcaactcctcctatgcgtacagaacctgtatctccaaggattgtaatgcttccttcaagatttttagggtatgttaacattgatacagccatagagccaagggctccattacgccatcggacattaagtacagctgagtcttctacttcaatattacgtcctagtgttgctatcatagcttgaacgtcagctataggaccaatcagccattcaaatagatctacatagtggcttgcttgattcatgagtgctccaccgtccatttcccatgtcccacgccattttgcagagttgtaataatcttggggacgttgccagaaaacatttatatggaccatatttatatgtccaaaacggttttcatctatagcacgttttaacagttgaagagttgggttaagtctattttgttttataacaaacagatatacacctgcttcatcacatgcttgaaccatatgtaatccatctttccatcgagtagccattggcttttctgtcatcacatgtttccctgcatttgctgagacgatcgtctggtgagcatgcaatccgcttggtgtacaaatagctacaatatcacattctgtgtttgcaaagagttgttcaaggttctcatagccaggaacattatattttttactatagttattacgactttcggcataactgtcacatacagcaacaagctcaatgtcttctttgtgatgattaattgcatctatatgattccctgcaatacgaccacaacctatgatagctatttttattttacgtcctactatgggttgcttcatcaatgacactccttttgcttgttagttttaggtctggtatgtacaatataccatacctataatctctgataaacagagcatgggtattatataaaaaatatataaagatttattacaatgttatatactactaattttagttatagtaatctactatatattacatatttactatattgtagtaaatatatattatgtactaaaaatataatagtatgttattatatattatatgtaaaaaaatccatgtactctatgtttttagagtacatggatttttaagtatacctatataaaagtagtaagtattttttaaattcttctattcagctatatgcatattatttgtagctataggtattggtaatactgtatgatttgtaatgggttcactttttgaagcattatgttttgaagtattatgtaaggtagaatctagctcttttaaaacgtctgcgagttcacatagtgtggtataagtattagagagagcgcagtctttcaaagtagagtcaggttcttcatttgtagtgttgaggggtacacgtgttttagctatttctttgatggtatctgaaagagatgaaagttcttttagtgtattttgtatagttgtgataaaatttaatgtgattttcccagatgttagagcataatttacatgtgttgtattatatttattgatttttttgataacactagtaatgtgttctgtttgtgtttgaatattataaagagtttgttcaattttctttattgtagacatagattgttgtgataattttttcacttcatttgctataatagaaaaaccttttcctggagttcccattttacctgcttccactgctaaattgatggcaagtaggtttgtttgatttgttactctatcaagtaatgtgagttttaaaagtatatcattaatccttttatgtaagagtataatgatattttgtagagaggagatatttatatttacatgttctattgaattaatagcatgtgttgtattttttatatcctgttctgaatttttataactgttctgaatttttgttacagtacattcgagattttgatttatagtagtaaatagatcttctatagatatagatgatggagtattttttacaatttgcattttaacagactctgtacacttagaaagataggctgtgaggttacatagtatttcttgagcgtgtttggttacattaacagctttatctggaagtgtttctaagtgagttattttagcagccattttttgttcattaattttagagctactaataatagtagataattctatttcatgctgtttttgtgtttcttttgtgatacttagttcatgtttgaggttttgaaattgttttataagttcaaatgttgtttgttttaatatatgcatttcatttttacacgtatagtaattcagagaaggtatttttgtttttgacagtgacttatttatatcttgtatgagtttattaataggtctaagacatttttgaataatgacccctataaggatgaacgaaattatcataagataggtagagatacccattaacatgattttactcggggggatataaatgagtaaacaacttgttaccataagggaagctgaaagcaaaagaaaagaaaaacaaagagacatataaaaattcctctatgaaatttggtcgatgcttgaatgtggtagagagttccttggagaggagaatagaatataaaaaaggatatatagtatggttcattaatcaaatgataaatattgatccatctatataatattataatagatatataaaattaaagaagtagctatattataacactacatgatctttaatttaaaaacattataagtattttatatcagatgtcaataactttaatttttgtataaaattattatatgtatgtaatataaataagttatataaaatatactgcaattttttataattttatcctttttaaaataggttatataaattaaaatagttacaacatgaggtgtattttaatatttacatatgtattatagtttatttatagttataaatataacaagttacttttagtaaagtatagatgtaaatataaaataattagtaatatcttattattggaaggaatgtagtatatatatatatgtaaataatgaacaggcctaataacatatagtcattaggcctgcattgacgatgctacagtataaagttcagttgaaaaactgaacagtttttatatggacacggtgtgcactgcctaacagtgttatacgtcgtcacacacaaaagataaggggatatttactccctagactcccacctcactgggagaaagataggtcatatatatgactttctctttcagaaaaatcattctgaacttttttgtctaaaatgtaaagcatttttttattttttagctgttttttatttttagttattactatttcattaataaatacaatatgtttagaaaattataactagttaaaaaaattgtaaaatgtaagagggaggtaaggaacaaagaaacagaaaagttatatcaattataatatagcagattaataatatgtctatagttaaaaaagaagtttttattacatttgttatatttggttattataatgtaagtagttagttgtaagcaaagatactccattcattattttctaaagaatatgccatgtgcgatgaatattctagactttgttcaactactttaatagagatattgttatatgttaggtaggtaaggtaaagaccttctgttgtaggtatacctttttcaaacggtagttttttggactgataatatccttttttggataaaagaagtgtaactgtatattcgccagggagtatagggaagtttacaggagtgattattttccctattggagaaaaagggttaaatttcaagtcttgagtaagaatagtatgactatgtgcagttgtattttctttaagaagaatgaaaagttttatttgttcaaagagatttttatttgttaatgtatagtcaattacaaaacaaaatttttcatttgtgtgtattaacaatgtattttcgttatgttcattaatacatgaaatattatctatcagaagttctggttgtgtatttgaggtgctaatatgaataggatttttattgaaagcaaggtgagactcttcccaactagatatttttaaaacagctagttctccaaagtaatattcctgagtattttgtataacaagaacatctacttttacaggtttttgtgatcgatagtgaataataatagaaagttcattaagattaaggtgtcgatatggcacattaaaagatatggtgccattagtgaataacattccatatttaagtatatctacagataatttgttatcgaaacagtgcatttttttagaggataacaagtcagtattatgattttctgtgagatgacactcagaaagaatagctcctcggtatactaatgatatagaagagatctcaagtggtgcttcaagaggtaatcctgttgatgagcggaattctatagaaattttttgttgatgttggatgtttttttcaagtggatgacgttgagatttgttagaagatggatgtataatcttagatgttgccattacttctgtttgaggtacagtgttgtttttgtctattttattcataaaaacaccttaattagtgaagagcagttggtgtgtgtgctaacaagtttagagaaaagtatttttctaagagtgtaagttgctatttctaaagatgtaataatgatgatagtaaaagcattgaaaaaatttttatagtataagggacagcctatattttgatgagtaggatgaaaatgtatatatgtattcataataaccaccattcataccataatcacttactctatcctagataatttaagcatagcataacctactagtgttcacaagtttttatttttttgaaagatattctttaacttatataaaatacaagggggaaaagatatgcactcctttatttattagtgttagataaaaaagttattaaggtaaataggataatagcttagtgtagttataatatacaaaaatataatacttttgaaatatataacataattactaacaaaaagcattagatatgtgttattattggtagtaagataaattatatttaagaagtatttctaacggactatagttataaataactttataaaattattgaaaatcagtatgtcttaattataatttataagattcagataaggagtaaataaacattatattagtgtatagtcttaggtaggttaaaaatattagaatactctcatagagatagcataggtaggttaaaacggcggtgttatgatagcattgactacatacttttttattctacaactaattttgtttgtagtattaagtattatagctgttaaaagtaatattattgttaaaggaaatcttttaataatgctctctgcgacattattagctacaattcctttacattatataggtcctcgtatcgcacgattatattctaatgaagtaaaaattgatactatgctagaattttttatttttactattctttttgcagggcttatacatcttatctcttttttatttaaaaaatatatttttaaaaaattctataagcctactaatgatacactattaagttttatttttgcaaatctttatcctgtatatgctgctctttttgctattattctttttttttggaggaagcatgattggtttccaaaatagagtgtattttttaatataattatatctacttccctttagttaaacaaatatatgacaatattacaataagtagatgtgatagatttaacagaggccattatatatggatacaatattctttattatatgtatgataaaataagactggcatttttatggtagaaactcgtgttagaagctcgttatactttatcttaggatcgttatgccttggagtaatagctactattcaggttttagttcctgaaaatatttctccattactgattggtgcaatgcgaataacaggtggtgccgtaacattacttttgtggggaatttttactcatggtcttccaacagctcgttattggccgataataccaacagtttgcgcagctcttgggcttattgcttttcaaatgacattttttgctggtatagataaggctggaatatcccttggcacatctatacctattggcattgttcttttagtatcaggactgtctgcaaaacttttttatcgtgaaaaagtttctcttcaatggattatctatacaattttggctttgataggtcttggttgtataattgctactagtagcagatggcatacaaacaaagaagctattattactgcaagtattgctggtattggttatgctttattccttgtttctagtaaagtattggtccgttttcatcgtgctgaaagtgtgatgactgtcttgtttactattagtgcaatagtactcttccctatttttttcatagagccatttagctggccaggaaaaggttctactgttctcctttcgttaatacaatttgctattataacaacagttattgctttttctctgattggtatggggttaaaaaatattacactttctgtatcttcaacactttctgttgcatgtacttttatggctgtatttttaggtatttttttcttggaagtacatcttagtatgcaacttatttttggtttaatattgttattagtatgtattacaatgcttgtaagacgtgagagaagaaatcctttttaaatcacacacacacacacacactctctctctctctttctcatccacttatttttatcttttttttattctcttcttttcttattctttcattactttttcatatggatacaatttccttttaatatcatttatagctttattatataaactattatttgtatctattaaatagtatctaaaaatttttatatcctttttctagaagatattcttttgaacatttaataagtaaagttttattttagaaaatatctaatgtttctctttatctctgatatgaaagatttcttattaagaaatatgaatacattttttttagaaaaagtattgtaaaaaaataaagtctatacttaccatagcaagcacagactttattatttaatggttttcatatatggggttaaagatactatagatatattctaaaataggaaaattctattatagatatattatatagaatgttttacctcatctgtatcttttttagttatgggtatgcgtatgtccatagttaccttgtagttatctacggagccgctctcttatatagtatgcttttaaattgttgactactaatctaatgtcagatataaattagaatataagaaaagtaccttttagataagagaaaattttcaactttttgaacataaccttttgagttatatgtttttttatttttaaacagcttttctatttctcttatgattttttactactttttatagtggatattaacttttgctccgtgaggtatctcttatgagaagtgttaacttgttagctttcctctgtgtatctattactttttttggattacttaatagttctttttcttatggctctcaagaacaactagcacaaaaggagcttaaacaactacaggacaaggttgttagtattcttgaagaaaaatgtttatcttgtcattcatataatgcagagttaccgttttatactaaaatcccaggcattaaacagattattgaaaaagactttaaagatggtctgcgagcatcagatttaaatcaagattttattgaagcttctaaaaaaggtataatagatgaagcaactgtagctaaattagagtgggttatagaaaaccatacaatgcctccagcaaaatttacagctgtccactggggaagtagagtttcaaaggaagatgaaaaaattattcttgaatgggtaagaaaatatcgtaacacatattatgcaacagggttagcgtctccagaacgctctaatgaacctattcagccaattccagatactattccttataataaacaaaaagcagcattaggagaaaaactttttaatgatagacgattatcccatgataatacaataagatgtgctagttgccatgtaacaagtgagggaatggcggatggcaagcagtttgcgacagggatcaataagcaaaaaggacatgttaatgctccaactgtatataatgctatttttaacactcgtcagttttgggatggacgtgcagcaaatctccaagaacaagcttctcagcctccattaaaccctatagaaatgggaagcactagttgggatgagattcttgggaagttagctaatgataagaaattaacagaagagtttttggcagtttatcctgatgggtggactgaaaaaaatgttacagacgctattgctgagtatgagagactatttattacacccaatagcccatttgatcgttggcttaaaggtgatgatacagcactaacctcagatgaattgagaggatataaactctttaaagcatacaggtgtgcaacatgtcatgttggtaagtcaatgggtggacagtcctttgaatacatggatcttaagaaagactattttgcagaccgtggatatgttgaaggagttgatgataatggtagaatggcctttacacatgatcctagggacttgcatcgatttaaggttccaaaccttaggaatattgagatgacggctccatatcttcatgatggtactgttacaagtttagatgaggctgttcgcattatgggtatctatcttgtaggaatggatattcctaagtcagatagagattctattgtgttatttttgagaacacttacaggtcagttcaatggtcaaaaagtccttggaacgcctgtaccacaataatagtagatatgtttctatatataaaaaaggaagctgtaagcttccttttttattaactagttgttagtagtaataattactctagagtaaattggagcctttgcatctgtataattaatatagtatttttgtcagtttttagtgattaagactggtataggtaaactgtaataagtaattataaatcaataattagagatcggtatcttttggtttttgagccacatatagatatgtctagtttatataggatacatagtagtaaagtaaagccactacatttgttacatagaagagagagaatatgtaaagtttaggtatgatgggtattaagctgttattaacctagtataatgacaaataattttacagagttctatagaatactatataataaatgcttcaagagtaatttatataatcctacgtagaaaagtagtgttctatctacagggtgaaattgtcatagtgtattagatgtaaagaaggattcttttcttttaactaagagaaaagaatccttctttatgggtaaattataggattaagatataggatttttcatttcatgaataagtgaagcaagagactgtgcttgttttgctaagtcagaaacagcttgtgaagcttcatccatggcccttgctgtttctgtagcaatatgattaatttcagaaatggattgattaatttcttctgtagaagctgactgttcttcagaagcagttgcaatagcacggacttggtcagctgttgcatctaccatatgaacgatttcatctaaagcaagtcctgactgagaagccagggttgtagcaatttcaatattttgaacagctgaatctacttgagacatactctgtgtagcactttcttggatagctttaatagcattgccaacatcagtagtagataccatagttttttcagcaagtttacgtacttcatcagcaacaactgcaaaaccacgaccagcttcaccagctcgagcagcttcaatggcagcattgagtgcaagtaggtttgtctgatcagcaatatctgaaataacacccatgatttgatcaatagattgtgcatgatcgcctaagacagccatatcagactttagctcacgggattgattatgcacagtttctatactttgaataacttttcggacaatatcagcaccatcaatagctttttgacgtgtttgagaagaaatatcagatgtttcacttgcatttttagcaacttctacaactgttgtactcatttcttccatagaggttgctgtttctttaactcgagctgcttgctcattagcaccacgtccagattcttcaatttgtgcagaaagctctgtagaagctgaagaaatgacattagcaatatcttcaagacgccctgctgctgtaaccatcccttcgtgtctaccttgttctgctcttttaagggcttcttctgctttagcagtggctactcttgcttcttcttctttacgttttgcagcttcactttgttgtgtagcttcaagaatttttgctttaagagagtcaaccattgtatttaatgctataccaagttgtcctatttcgtcggttgaggtgatctttagatgttgatcaagatgtcctgctgcaacattttgagcaaatagtgttgtttgggtaacaggtttagttatactccttgtgacaatgaatgacacaacgattgtgataagaagaagtattccagtaataataaaaataagtccatttgcacgttggaggcgtgtgttaacatatgtagcttctgtttgaatttttgagagattgtcatttgttaacttcattagtttttcacctaaggcatcagcaagttgacggcgataatctaaatctactttgctttgttcagtcatagaaacaaggttttttaggagttgattatatactcctatagacctgattaatgtttgaagtccattacgcatatcttctgctctaaagcgatttttaaatatagatagcttattcataagctcatcaataccttgagtactttttttcaaattatcaatatcttgttccctcaacgcactagaatagtcgcctcgaaggagatagagttgcatcattaaagttcctagctctgaatagtataacagtgcattgtcatcattagcgtattgcttgttcattattgatacaatttgactatattgctggaagacattgtggataacattggtacctttagaggattcttcattaaagtccatagatttactatacagattttttactgcaacatcataatctgtaaagatttttcctatttcattgatatctttttcaaggtattgatttgaggtagacgtagaagcaaattttttggcttggctgagatattctctagctttgttaagttcttttatacagcgatcatagtcttcttgctttctagaagcataaaatcctcgcatataataaatagcttcttgataacgtgtgagcatattggaagcaatttcaattatctgtgatgtttctttatctataacttccatagtcttgctagaaggtcctagttcttgagaaacatagatccccatcaaaactaccatgatcattccaatggcaaaaccagcacttatcttataaccaagcttcattgtacgcccccatctattatggttgtatgagaactatagttttttggtcatgaatagttttatacttgtataaaaattttaaatcaatacatttataaaacatataattaaaattttatatgtatagatatatacttttaatatttattaaatatttttttaataaaaaatattatttatatattacataataatttttatattttttgtaatagtaaaaaaatttgtaataaagatagtatatagttaaaatttatatattattttaatatatagtaaaaatatgtttttttaatgtaaaaaatatttttataacataagtttcgtcagatgttgaatgagaaaaggctttatgataaacttaatgattgaataatgcataaagtataccttgctattgtgcagagctaatctagggatagaggatcttttttatagtcatgataggcgttgggttgtcaaaaaataattatgtggttatatatgtaacaaagtgtattgctatattgttgggtcttatatttttagagaggttttatgtatacgcttactattgaacagctgcgtagtgatcttgaagctcacttaacagagctttcggcggttacaagacagactgataattatacattgcttaaaaagcttaaacagagattagcaaagattagagaggattatcttgatgcttatgaagcacaacaagcatatgatgcttttttgacaagtggagactctcctattcctttaagcgaagtagagagaaagcttgccttggcagattaattttatacctcatgcagcaaaacagcttaggaagttagattcagagatccaaaagcgtatacttcagtttttacatctacgtattattaatactccggaaccacagaaattaggtaaagctttagttggaacacatcaggacctttttcgttttcgtataggaaagtatagaatactatgtcatatttgtaaggaaaataatacaattcttatagttgctgttggacatagaaattatatttataattaactctccatgtaaaagtttatttttagtcattttaggatagattaacaaatgtaatctgatatagtttatatcttctgtttgaaacatccctgatagtcagggatgtttttttatcgagtaaaatcagagattgttctattattagagagagcattctacgtactagaaggtatacaacctattattatattctaattaataaacatggatgacaatataagattaattagaatacagagtggttactatttaaatgatattaatatgggtttataactacaacttataattaaaaaataaaataattatttatagactgcttttaacaagtatgatttttttcaagatatagaagaatattagaaggaaagcctaagaattttacatgatttgtatatatatatatgctgtagttggttacagagattttttaactcttttgttgaaagaagattaaggtgttgttcttgagaaagttctttatatcctaaaaggttaagtaatttcctatgaagaggtttaggaagccagtggattaaaggaagtagggaatgaaattctaaaggatgccagcgatttggcgttgtaagaaaaacatatttttttgcaactctgtaacactcgttgataaaagattgttgttgtgaagtacagcctgtatgttcaattactgctgaagaaaagacaagatcaaatgtattatcattaaaaggaagtttacagccatcgccatagacaaatttaagaccactgtattctttctctaaccaagaggcgttttgtttagaaagtgcaacaattttttcaggataaggaaataatttttcaaaaaagtttgattcagcattatctttataagatgtaactcctatatcaagaacatgttctagtgatgagaaatcaatataactttttagccgtttaaatatacgttttcgtatattgaatgaaatattacttaaaaaagatagcggtaaattgtaatctataccatgtataagtgaaacacgactcatatctttatcccattgagcactaggttaactatgttttaaagaagaatgaaataatataactaacatatcttagttatattgttttct

(The sequence listing continues in the following parts.)
